(19) United States
(12) Patent Application Publication
(10) Pub. No.: US 2009/0239214 A1
(43) Pub. Date: Sep. 24, 2009

(54) Prognosis of breast cancer patients

(76) Inventors: Hongyue Dai, Kenmore, WA (US); Yudong He, Kirkland, WA (US); Mao Mao, Redmond, WA (US); Bernard Fine, Menlo Park, CA (US); Laura J. van't Veer, Amsterdam (NL); Marc J. van de Vijver, Amsterdam (NL)

Correspondence Address: JONES DAY, 222 EAST 41ST ST, NEW YORK, NY, 10017, US

(21) Appl. No.: 11/658,605

(22) PCT Filed: Aug. 1, 2005
(86) PCT No.: PCT/US05/27243

§ 371 Date: Feb. 27, 2009

Related U.S. Application Data
(60) Provisional application No. 60/592,858, filed on Jul. 30, 2004.

(51) Int. Cl. C12Q 1/68; G06F 19/00

(52) U.S. Cl. 435/6; 702/19

(57) ABSTRACT

The present invention relates to sets of genetic markers whose expression is correlated with prognosis of breast cancer in individuals having breast cancer. Specifically, the invention provides sets of markers whose expression patterns can be used to differentiate individuals having a good prognosis, e.g., no reoccurrence or metastasis within five years of initial diagnosis, and individuals having a poor prognosis, e.g., reoccurrence or metastasis within five years of initial diagnosis. The invention relates to methods of prognosis using these markers. The invention also relates to microarrays containing probes to these markers, and to kits containing ready-to-use microarrays and computer software for data analysis using the prognostic and statistical methods disclosed herein.

[0001] This application claims the benefit under 35 U.S.C. § 119(e) of U.S. Provisional Patent Application No. 60/592,858, filed on Jul. 30, 2004, which is incorporated by reference herein in its entirety.

### 1. FIELD OF THE INVENTION

[0002] The present invention relates to the identification of marker genes useful in the diagnosis and prognosis of breast cancer. More particularly, the invention relates to the identification of sets of marker genes able to distinguish individuals having breast cancer with good clinical prognosis from individuals with poor clinical prognosis. The invention further relates to methods of distinguishing breast cancer-related conditions using the identified sets of markers. The invention further provides methods for determining the course of treatment of a patient with breast cancer.

### 2. BACKGROUND OF THE INVENTION

[0003] The increased number of cancer cases reported in the United States, and, indeed, around the world, is a major concern. Currently there are only a handful of treatments available for specific types of cancer, and these provide no guarantee of success. In order to be most effective, these treatments require not only an early detection of the malignancy, but a reliable assessment of the severity of the malignancy.

[0004] The incidence of breast cancer, a leading cause of death in women, has been gradually increasing in the United States over the last thirty years. Its cumulative risk is relatively high; 1 in 8 women are expected to develop some type of breast cancer by age 85 in the United States. In fact, breast cancer is the most common cancer in women and the second most common cause of cancer death in the United States. In 1997, it was estimated that 181,000 new cases were reported in the U.S., and that 44,000 people would die of breast cancer (Parker et al., CA Cancer J. Clin. 47:5-27 (1997); Chu et al., J. Nat. Cancer Inst. 88:1571-1579 (1996)). While mechanism of tumorigenesis for most breast carcinomas is largely unknown, there are genetic factors that can predispose some women to developing breast cancer (Miki et al., Science, 266:66-71 (1994)). The discovery and characterization of BRCA1 and BRCA2 has recently expanded our knowledge of genetic factors which can contribute to familial breast cancer. Germ-line mutations within these two loci are associated with a 50 to 85% lifetime risk of breast and/or ovarian cancer (Casey, Curr. Opin. Oncol. 9:88-93 (1997); Marcus et al., Cancer 77:697-709 (1996)). Only about 5% to 10% of breast cancers are associated with breast cancer susceptibility genes, BRCA1 and BRCA2. The cumulative lifetime risk of breast cancer for women who carry the mutant BRCA1 is predicted to be approximately 92%, while the cumulative lifetime risk for the non-carrier majority is estimated to be approximately 10%. BRCA1 is a tumor suppressor gene that is involved in DNA repair and cell cycle control, which are both important for the maintenance of genomic stability. More than 90% of all mutations reported so far result in a premature truncation of the protein product with abnormal or abolished function. The histology of breast cancer in BRCA1 mutation carriers differs from that in sporadic cases, but mutation analysis is the only way to find the carrier. Like BRCA1, BRCA2 is involved in the development of breast cancer, and like BRCA1 plays a role in DNA repair. However, unlike BRCA1, it is not involved in ovarian cancer.

[0005] Other genes have been linked to breast cancer, for example c-erb-2 (HER2) and p53 (Beenken et al., Ann. Surg. 233(5):630-638 (2001). Overexpression of c-erb-2 (HER2) and p53 have been correlated with poor prognosis (Rudolph et al., Hum. Pathol. 32(3):311-319 (2001), as has been aberrant expression products of mdm2 (Lukas et al., Cancer Res. 61(7):3212-3219 (2001) and cyclin1 and p27 (Porter & Roberts, International Publication WO98/33450, published Aug. 6, 1998). However, no other clinically useful markers consistently associated with breast cancer have been identified.

[0006] Sporadic tumors, those not currently associated with a known germline mutation, constitute the majority of breast cancers. It is also likely that other, non-genetic factors also have a significant effect on the etiology of the disease. Regardless of the cancer's origin, breast cancer morbidity and mortality increases significantly if it is not detected early in its progression. Thus, considerable effort has focused on the early detection of cellular transformation and tumor formation in breast tissue.

[0007] A marker-based approach to tumor identification and characterization promises improved diagnostic and prognostic reliability. Typically, the diagnosis of breast cancer requires histopathological proof of the presence of the tumor. In addition to diagnosis, histopathological examinations also provide information about prognosis and selection of treatment regimens. Prognosis may also be established based upon clinical parameters such as tumor size, tumor grade, the age of the patient, and lymph node metastasis.

[0008] Diagnosis and/or prognosis may be determined to varying degrees of effectiveness by direct examination of the outside of the breast, or through mammography or other X-ray imaging methods (Jatoi, Am. J. Surg. 177:518-524 (1999)). The latter approach is not without considerable cost, however. Every time a mammogram is taken, the patient incurs a small risk of having a breast tumor induced by the ionizing properties of the radiation used during the test. In addition, the process is expensive and the subjective interpretations of a technician can lead to imprecision. For example, one study showed major clinical disagreements for about one-third of a set of mammograms that were interpreted individually by a surveyed group of radiologists. Moreover, many women find that undergoing a mammogram is a painful experience. Accordingly, the National Cancer Institute has not recommended mammograms for women under fifty years of age, since this group is not as likely to develop breast cancers as are older women. It is compelling to note, however, that while only about 22% of breast cancers occur in women under fifty, data suggests that breast cancer is more aggressive in pre-menopausal women.

[0009] In clinical practice, accurate diagnosis of various subtypes of breast cancer is important because treatment options, prognosis, and the likelihood of therapeutic response all vary broadly depending on the diagnosis. Accurate prognosis, or determination of distant metastasis-free survival could allow the oncologist to tailor the administration of adjuvant chemotherapy, with women having poorer prognoses being given the most aggressive treatment. Furthermore, accurate prediction of poor prognosis would greatly impact clinical trials for new breast cancer therapies, because potential study patients could then be stratified according to prognosis. Trials could then be limited to patients having poor prognosis, in turn making it easier to discern if an experimental therapy is efficacious.

[0010] Adjuvant systemic therapy has been shown to substantially improve the disease-free and overall survival in both premenopausal and postmenopausal women up to age 70 with lymph node negative and lymph node positive breast cancer. See Early Breast Cancer Trialists' Collaborative Group, Lancet 352(9132):930-942 (1998); Early Breast Cancer Trialists' Collaborative Group, Lancet 351(9114):1451-1467 (1998). The absolute benefit from adjuvant treatment is larger for patients with poor prognostic features and this has resulted in the policy to select only these so-called ‘high-risk’ patients for adjuvant chemotherapy. Goldhirsch et al., Meeting highlights: International Consensus Panel on the Treatment of Primary Breast Cancer, Seventh International Conference on Adjuvant Therapy of Primary Breast Cancer, J. Clin. Oncol. 19(18):3817-3827 (2001); Eifel et al., National Institutes of Health Consensus Development Conference Statement: Adjuvant Therapy for Breast Cancer, Nov. 1-3, 2000, J. Natl. Cancer Inst. 93(13):979-989 (2001). Accepted prognostic and predictive factors in breast cancer include age, tumor size, axillary lymph node status, histological tumor type, pathological grade and hormone receptor status. A large number of other factors has been investigated for their potential to predict disease outcome, but these have in general only limited predictive power. Isaacs et al., Semin. Oncol. 28(1):53-67 (2001).

[0011] Using gene expression profiling with cDNA microarrays, Perou et al. showed that there are several subgroups of breast cancer patients based on unsupervised cluster analysis: those of “basal type” and those of “luminal type.” Perou et al., Nature 406(6797):747-752 (2000). These subgroups differ with respect to outcome of disease in patients with locally advanced breast cancer. Sorlie et al., Proc. Natl. Acad. Sci. U.S.A. 98(19): 10869-10874 (2001). In addition, microarray analysis has been used to identify diagnostic categories, e.g., BRCA1 and 2 (Hedenfalk et al., N. Engl. J. Med. 344(8):539-548 (2001); van't Veer et al., Nature 415(6871):530-536 (2002)); estrogen receptor status (Perou, supra; Van't Veer, supra; Gruvberger et al., Cancer. Res. 61(16):5979-5984 (2001)) and lymph node status (West et al., Proc. Natl. Acad. Sci. U.S.A. 98(20):11462-11467 (2001); Ahr et al., Lancet 359(9301):131-132 (2002)). Recently, a collection of 70 markers was identified for breast cancer that could classify an individual as having a good prognosis or poor prognosis. See Van't Veer et al., Nature 415(6871):530-536 (2002). This set of markers was derived from individuals who were all less than 55 years of age.

[0012] The power of gene expression analysis in the identification of prognosis-relevant genes having been demonstrated, there still exists a need in the art for additional sets of prognosis-relevant markers for individuals having breast cancer, e.g., individuals 55 years of age and older. The present invention provides marker sets that are useful for the prognosis of breast cancer in individuals, particularly individuals 55 years of age and older.

### 3. SUMMARY OF THE INVENTION

[0013] The present invention provides a method for classifying an individual with breast cancer as having a good prognosis or a poor prognosis, wherein said individual is 55 years of age or older, comprising detecting a difference in the expression of a first plurality of genes in a cell sample taken from the individual relative to a control, said first plurality of genes comprising 10 of the genes corresponding to the different markers listed in any of Tables 1-8, wherein “good prognosis” is a desired outcome and “poor prognosis” is an undesired outcome. In a specific embodiment, said plurality comprises 20 of the genes corresponding to the different markers listed in any of Tables 1-8. In a specific embodiment of the method, said plurality comprises 50 of the genes corresponding to the different markers listed in any of Tables 1-8. In another specific embodiment, said plurality comprises each of the genes corresponding to the markers listed in Table 1. In another specific embodiment, said plurality comprises each of the genes corresponding to the markers listed in Table 3. In another specific embodiment, said individual is identified as ER+, and said plurality comprises 10 of the genes corresponding to the markers listed in Table 5. In another specific embodiment, said individual is identified as ER+, and said plurality comprises 50 of the genes corresponding to the markers listed in Table 5. In another specific embodiment, said individual is identified as ER+, and said plurality comprises each of the genes corresponding to the markers listed in Table 5. In another specific embodiment, said individual is identified as ER+, and said plurality comprises 10 of the genes corresponding to the markers listed in Table 7. In another embodiment, said individual is identified as ER+, and said plurality comprises 50 of the genes corresponding to the markers listed in Table 7. In another specific embodiment, said individual is identified as ER+, and said plurality comprises each of the genes corresponding to the markers listed in Table 7. In another specific embodiment, said control comprises nucleic acids derived from a pool of tumors from individual sporadic patients. In another specific embodiment, said good prognosis is the non reoccurrence or metastasis within five years of initial diagnosis, and said poor prognosis is the reoccurrence or metastasis within five years of initial diagnosis. In another specific embodiment, said detecting comprises the steps of: (a) generating a good prognosis template by hybridization of nucleic acids derived from a plurality of good prognosis patients against nucleic acids derived from a pool of tumors from individual patients; (b) generating a poor prognosis template by hybridization of nucleic acids derived from a plurality of poor prognosis patients against nucleic acids derived from said pool of tumors from said plurality of individual patients; (c) hybridizing an nucleic acids derived from and individual sample against said pool; and (d) determining the similarity of marker gene expression in the individual sample to the good prognosis template and the poor prognosis template, wherein if said expression is more similar to the good prognosis template, the sample is classified as having a good prognosis, and if said expression is more similar to the poor prognosis template, the sample is classified as having a poor prognosis.

[0014] The invention further provides a method for classifying a sample as derived from an individual having a good prognosis or derived from an individual having a poor prognosis, wherein said individual is 55 years of age or older, by calculating the similarity between the expression of at least 10 of the different markers listed in any of Tables 1-8 in the sample to the expression of the same markers in a good prognosis nucleic acid pool and a poor prognosis nucleic acid pool, comprising the steps of: (a) labeling nucleic acids derived from a sample, with a first fluorophore to obtain a first pool of fluorophore-labeled nucleic acids; (b) labeling with a second fluorophore a first pool of nucleic acids derived from two or more samples from individuals having a good prognosis (good prognosis pool), and a second pool of nucleic acids derived from two or more samples from individuals having a poor prognosis (poor prognosis pool): (c) contacting said first fluorophore-labeled nucleic acid and said first pool of second fluorophore-labeled nucleic acid with a first microarray under conditions such that hybridization can occur, and contacting said first fluorophore-labeled nucleic acid and said second pool of second fluorophore-labeled nucleic acid with a second microarray under conditions such that hybridization can occur, wherein said first microarray and said second microarray are similar to each other, exact replicas of each other, or are identical, detecting at each of a plurality of discrete loci on the first microarray a first flourescent emission signal from said first fluorophore-labeled nucleic acid and a second fluorescent emission signal from said first pool of second fluorophore-labeled genetic matter that is bound to said first microarray under said conditions, and detecting at each of the marker loci on said second microarray said first fluorescent emission signal from said first fluorophore-labeled nucleic acid and a third fluorescent emission signal from said second pool of second fluorophore-labeled nucleic acid; (d) determining the similarity of the sample to the good prognosis and poor prognosis pools by comparing said first fluorescence emission signals and said second fluorescence emission signals, and said first emission signals and said third fluorescence emission signals; and (e) classifying the sample as derived from an individual having a good prognosis where the first fluorescence emission signals are more similar to said second fluorescence emission signals than to said third fluorescent emission signals, and classifying the sample as derived from an individual having a poor prognosis where the first fluorescence emission signals are more similar to said third fluorescence emission signals than to said second fluorescent emission signals. In a specific embodiment, said similarity is calculated by determining a first sum of the differences of expression levels for each marker between said first fluorophore-labeled nucleic acid and said first pool of second fluorophore-labeled nucleic acid, and a second sum of the differences of expression levels for each marker between said first fluorophore-labeled nucleic acid and said second pool of second fluorophore-labeled nucleic acid, wherein if said first sum is greater than said second sum, the sample is classified as derived from an individual having a poor prognosis, and if said second sum is greater than said first sum, the sample is classified as derived from an individual having a good prognosis.

[0015] The invention further provides a method for determining a set of marker genes whose expression is associated with a particular phenotype, comprising the steps of: (a) selecting a phenotype having two or more phenotype categories; (b) identifying a first plurality of genes, wherein the expression of said genes in a first plurality of samples is correlated or anticorrelated with one of the phenotype categories; (c) predicting the phenotype category of each sample in said plurality of samples based on the expression level of each of said plurality of genes across all other samples in said plurality of samples; (d) selecting those samples for which the phenotype category is correctly predicted, to form a second plurality of samples; (e) identifying a second plurality of genes, wherein the expression of said genes in said second plurality of samples is correlated or anticorrelated with one of the phenotype categories; wherein said second plurality of genes is a set of marker genes whose expression is associated with a particular phenotype. In a specific embodiment, said phenotype is breast cancer, and said phenotype categories are good prognosis and poor prognosis. In another specific embodiment, said second plurality of marker genes is validated by: (a) using a statistical method to randomize the association between said second plurality of marker genes and said phenotype category, thereby creating a control correlation coefficient for each marker gene; (b) repeating step (a) one hundred or more times to develop a frequency distribution of said control correlation coefficients for each marker gene; (c) determining the number of marker genes having a control correlation coefficient above a preselected threshold, thereby creating a control marker gene set; and (d) comparing the number of control marker genes so identified to the number of marker genes, wherein if the difference between the number of marker genes and the number of control genes is statistically significant, said set of marker genes is validated. In another specific embodiment, said second plurality of marker genes is optimized by the method comprising: (a) rank-ordering the genes by amplitude of correlation or by significance of the correlation coefficients to create a rank-ordered list, and (b) selecting an arbitrary number n of marker genes from the top of the rank-ordered list. In a more specific embodiment, said set of marker genes is further optimized by the method comprising: (a) calculating an error rate for said arbitrary number n of marker genes; (b) increasing by 1 the number of genes selected from the top of the rank-ordered list; (c) calculating an error rate for said number of genes selected from the top of the rank-ordered list; (d) repeating steps (b) and (c) until said number of genes selected from the top of the rank-ordered list includes all genes included in said rank ordered list, and (e) identifying said number of genes selected from the top of the rank-ordered list for which the error rate is smallest, wherein said set of marker genes is optimized when the error rate is the smallest.

[0016] The invention also provides a method for assigning a person to one of a plurality of categories in a clinical trial, comprising determining for each said person the level of expression of at least 10 of the different prognosis markers listed in any of Tables 1-8, determining therefrom whether the person has an expression pattern that correlates with a good prognosis or a poor prognosis, and assigning said person to one category in a clinical trial if said person is determined to have a good prognosis, and a different category if that person is determined to have a poor prognosis.

[0017] The invention further provides a microarray comprising a plurality of probes complementary and hybridizable to at least 10 different genes for which markers are listed in any one of Tables 1-8, wherein said plurality of probes is at least 50% of probes on said microarray. In a specific embodiment, said plurality of probes is at least 50% of probes on said microarray. In another specific embodiment, said plurality of probes is at least 70% of probes on said microarray. In another specific embodiment, said plurality of probes is at least 90% of probes on said microarray. In another specific embodiment, said plurality of probes is at least 95% of probes on said microarray. In another specific embodiment, at least 98% of the probes on the microarray are present in any one of Tables 1-6.

[0018] The invention also provides a microarray for distinguishing a cell sample from an individual having a good prognosis from a cell sample from an individual having a poor prognosis, wherein said individual is 55 years of age or older, comprising a positionally-addressable array of polynucleotide probes bound to a support, said polynucleotide probes comprising a plurality of polynucleotide probes of different nucleotide sequences, each of said different nucleotide sequences comprising a sequence complementary and hybridizable to a different gene, said plurality consisting of at least 10 of the different genes corresponding to the markers listed in any of Tables 1-8, wherein said plurality of polynucleotide probes is at least 50% of probes on said microarray.

[0019] The invention further provides a kit for determining whether a sample is derived from a patient having a good prognosis or a poor prognosis, wherein said patient is 55 years of age or older, comprising at least one microarray comprising probes to at least 10 of the different genes corresponding to the markers listed in any of Tables 1-8, and a computer readable medium having recorded thereon one or more programs for determining the similarity of the level of nucleic acid derived from the markers listed in Table 1-8 in a sample to that in a pool of samples derived from individuals having a good prognosis and a pool of samples derived from individuals having a good prognosis, wherein the one or more programs cause a computer to perform a method comprising computing the aggregate differences in expression of each marker between the sample and the good prognosis pool and the aggregate differences in expression of each marker between the sample and the poor prognosis pool, or a method comprising determining the correlation of expression of the markers in the sample to the expression in the good prognosis and poor prognosis pools.

[0020] The invention also provides a method for classifying a breast cancer patient according to prognosis, wherein said patient is 55 years of age or older, comprising: (a) comparing the respective levels of expression of at least 10 different genes for which markers are listed in any of Tables 1-8 in a cell sample taken from said breast cancer patient to respective control levels of expression of said at least 10 genes; and (b) classifying said breast cancer patient according to prognosis based on the similarity between said levels of expression in said cell sample and said control levels. In a specific embodiment, step (b) comprises determining whether said similarity exceeds one or more predetermined threshold values of similarity. In a more specific embodiment, the method further comprises determining prior to step (a) said level of expression of said at least five genes. In another specific embodiment, said control levels are the mean levels of expression of each of said at least five genes in a pool of tumor samples obtained from a plurality of breast cancer patients who have no distant metastasis within five years of initial diagnosis. In another specific embodiment, said control levels comprise the expression levels of said genes in breast cancer patients who have had no distant metastasis within five years of initial diagnosis. In another specific embodiment, wherein said control levels comprise, for each of said at least five genes, mean log intensity values stored on a computer.

[0021] The invention further provides a computer program product for classifying a breast cancer patient according to prognosis, said patient being 55 years of age or older, the computer program product for use in conjunction with a computer having a memory and a processor, the computer program product comprising a computer readable storage medium having a computer program encoded thereon, wherein said computer program product can be loaded into the one or more memory units of a computer and causes the one or more processor units of the computer to execute the steps of: (a) receiving a first data structure comprising the respective levels of expression of each of at least 10 different genes for which markers are listed in any of Tables 1-8 in a cell sample taken from said patient; (b) determining the similarity of the level of expression of each of said at least ten genes to respective control levels of expression of said at least five genes to obtain a patient similarity value; (c) comparing said patient similarity value to a selected threshold value of similarity of said respective levels of expression of each of said at least 10 genes to said respective control levels of expression of said at least 10 genes; and (d) classifying said patient as having a first prognosis if said patient similarity value exceeds said threshold similarity value, and a second prognosis if said patient similarity value does not exceed said threshold similarity value. In a specific embodiment, said threshold value of similarity is a value stored in said computer. In another specific embodiment, said control levels of expression of said at least 10 genes are stored in said computer. In another specific embodiment, said computer program, when loaded into memory, further causes said one or more processor units of the computer to execute the steps of receiving a data structure comprising clinical data specific to said breast cancer patient. In another specific embodiment, said respective control levels of expression of said at least 10 genes comprises a set of single-channel mean hybridization intensity values for each of said at least 10 genes, stored on said computer readable storage medium. In a more specific embodiment, said single-channel mean hybridization intensity values are log transformed. In another specific embodiment, said computer program product causes said processing unit to perform said comparing step (c) by calculating the difference between the level of expression of each of said at least five genes in said cell sample taken from said breast cancer patient and said respective control levels of expression of said at least five genes. In another specific embodiment, said computer program product causes said processing unit to perform said comparing step (c) by calculating the mean log level of expression of each of said at least 10 genes in said control to obtain a control mean log expression level for each gene, calculating the log expression level for each of said at least 10 genes in a breast cancer sample from said patient to obtain a patient log expression level, and calculating the difference between the patient log expression level and the control mean log expression for each of said at least 10 genes. In another specific embodiment, said computer program product causes said processing unit to perform said comparing step (c) by calculating similarity between the level of expression of each of said at least 10 genes in said cell sample taken from said patient and said respective control levels of expression of said at least 10 genes, wherein said similarity is expressed as a similarity value. In a more specific embodiment, said similarity value is a correlation coefficient.

### 4. BRIEF DESCRIPTION OF THE FIGURES

[0022] FIG. 1. Overview of gene expression data for a sample group of 153 breast cancer tumors from patients of age >55 years over approximately 10,000 significant genes. Each row displays a tumor profile, and each column displays the data for a gene. White indicates the most overexpression relative to the reference pool, black indicates the most underexpression relative to the reference pool, and medium gray indicates no change.

[0023] FIG. 2. The predictive power of the 70 marker classifier (see Van't Veer et al., Nature 415(6871):530-536 (2002)) for 153 tumors from this study. The overall odds ratio is 2.5 [26 38 19 70], and 5 year odds ratio is 5.2 [21 30 8 59]. The overall error rate is 0.387 and 5 year error rate is 0.306. Error rates for prediction of outcome for good outcome samples and poor outcome samples were calculated based upon the selected threshold (X-axis). Circles: Error rate for good prognosis samples. Stars: Error rates for poor prognosis samples. Line: average of good prognosis and poor prognosis error rates.

[0024] FIG. 3. Expression pattern of 70 prognosis markers identified by a clustering method previously as described (see Van't Veer et al., Nature 415(6871):530-536 (2002)) based on breast tumor profiles from patients of age <55 years. The pattern is associated with the metastasis as shown in the panel on the right (=1 for metastasis samples and =0 for metastasis-free samples).

[0025] FIG. 4. Procedures used in identifying the optimal set of discriminating genes for the purpose of prognosis (the “Homogeneous method”, also called “iterative algorithm”).

[0026] FIG. 5. The classification error rate for type 1 and type 2 together as a function of the number of discriminating genes used in the classifier. The combined optimal error rate is reached by approximately 200 discriminating marker genes. The classifier was constructed by using the same method used in out previous study (see Van't Veer et al., Nature 415(6871):530-536 (2002)) (“the Nature method”) and as described herein. Circles: error for a particular number of markers used in the classifier. X-axis: number of reporters. Y-axis: error rate.

[0027] FIG. 6. Expression profile of 200 reporter genes in the optimal prognosis classifier constructed by the Nature method (Van't Veer (2000)) based on breast tumor profiles from patients with age >55 years. The profile can be used to predict the metastasis status as shown in the panel on right side (1=metastasis within 5 years of initial diagnosis; and 0=metastasis-free at least within 5 years of initial diagnosis).

[0028] FIG. 7. The classification error rate for type 1 and type 2 together as a function of the number of discriminating genes used in the classifier. The combined optimal error rate is reached at approximately 100 discriminating marker genes. The classifier is modeled by using the new method discussed in the text (“the homogenous method”). Circles: error for a particular number of markers used in the classifier. X-axis: number of reporters. Y-axis: error rate.

[0029] FIGS. 8A, 8B. FIG. 8A: Scattering plots between the correlation of tumor profiles to “poor outcome group” and the correlation of tumor profiles to “good outcome group” based on the new optimal classifier. Filled circles: good outcome patients. Squares: poor outcome patients. FIG. 8B Type 1 error rate, type 2 error rate, and average type 1 and type 2 error rate as a function of threshold.

[0030] FIG. 9. Gene expression pattern of 100 genes identified by the “iterative algorithn” (see Example 3) that can be used to predict the disease outcome. The profile can be used to predict the metastasis status as shown in the panel on right side (1=metastasis; 0=metastasis-free).

[0031] FIGS. 10A-10C. Kaplan-Meier plots of the metastasis free probability as a function of time since initial diagnosis. Patients with breast cancer in the age group >55 years are classified as either “poor prognosis” or “good prognosis” group based on a classifier with 70 genes derived from data of age group <55 years in our previous study (FIG. 10A), a classifier with 200 genes built with the same method but based on this data set (FIG. 10B), and a classifier with 100 genes built with a new method that looks for homogenous patterns in each group based on this data set (FIG. 10C).

[0032] FIGS. 11A, 11B. Classification error rate for type 1 and type 2 together as a function of the number of discriminating genes used in the classifier for ER+ sample group by the previously-published method (Van't Veer (2002); FIG. 11A); and by the iterative method (see Example 3; FIG. 11B).

[0033] FIG. 12. Gene expression pattern of 200 genes identified by the previously-published algorithm (Van't Veer (2002)) that can be used to predict the disease outcome for ER+ patient population (118 samples in the present study). The panel on the right indicates which samples are metastasis-positive (=1) and metastasis-free (═O).

[0034] FIG. 13. Gene expression pattern of 100 genes identified by the iterative algorithm that can be used to predict the disease outcome for ER+ patient population (118 samples in the present study. The panel on the right indicates which samples are metastasis-positive (=1) and metastasis-free (=0).

[0035] FIGS. 14A-14C. Kaplan-Meier plots of the metastasis free probability as a function of time since initial diagnosis. Patients with breast cancer in the age group >55 years and ER+ (118 patients total) are classified into a “poor prognosis” group and a “good prognosis” group based on a classifier with 70 genes derived from data of age group <55 years in our previous study (FIG. 14A); a classifier with 200 genes built with the same method but based on this data set (FIG. 14B); and a classifier with 100 genes build with an iterative method (Example 3) that looks for homogenous patterns in each group based on this data set (FIG. 14C).

### 5. DETAILED DESCRIPTION OF THE INVENTION

### 5.1 Markers Useful in the Prognosis of Breast Cancer

### 5.1.1 Definitions

[0036] As used herein, “age 55+ individuals” means individuals that are age 55 or older.

[0037] As used herein, “BRCA1 tumor” means a tumor having cells containing a mutation of the BRCA1 locus.

[0038] The “absolute amplitude” of a correlation coefficient means the absolute value of the correlation coefficient, e.g., both correlation coefficients −0.35 and 0.35 have an absolute amplitude of 0.35.

[0039] “Good prognosis” means a desired outcome. For example, in the context of breast cancer, a good prognosis may be an expectation of no reoccurrences or metastasis within two, three, four, five years or more of initial diagnosis of breast cancer.

[0040] “Poor prognosis” means an undesired outcome. For example, in the context of breast cancer, a poor prognosis may be an expectation of a reoccurrence or metastasis within two, three, four, or five years of initial diagnosis of breast cancer.

[0041] “Marker” means a gene or gene products, or an EST derived from that gene, the expression or level of which changes between certain conditions. Where the expression of the gene or gene products correlates with a certain condition, the gene or its products are a marker for that condition.

[0042] “Marker-derived polynucleotides” means the RNA transcribed from a marker gene, any cDNA or cRNA produced therefrom, and any nucleic acid derived therefrom, such as synthetic nucleic acid having a sequence derived from the marker gene.

[0043] As used herein, “prognosis informative” means statistically significantly correlated. For example, the expression of a particular gene is prognosis-informative if its expression is significantly correlated with either a good prognosis or a poor prognosis.

[0044] A “similarity value” is a number that represents the degree of similarity between two things being compared. For example, a similarity value may be a number that indicates the overall similarity between a patient's expression profile using specific phenotype-related markers and a control specific to that phenotype (for instance, the similarity to a “good prognosis” template, where the phenotype is a good prognosis). The similarity value may be expressed as a similarity metric, such as a correlation coefficient, or may simply be expressed as the expression level difference, or the aggregate of the expression level differences, between a patient sample and a template.

[0045] ER designates the estrogen receptor status of a breast cancer patient. ER⁺ designates a high ER level, while ER⁻ designates a low ER level. The ER status of a breast cancer patient can be evaluated by various means. In one embodiment, the ER level is determined by measuring an expression level of a gene encoding the estrogen receptor in a patient. In one embodiment, the gene encoding the estrogen receptor is the estrogen receptor a gene. In a specific embodiment, the expression level of the estrogen receptor a gene in the patient relative to the expression level of the gene in a pool of breast tumor samples is used as a measure of the ER status, and the ER level is classified as ER⁺ if the log 10(ratio) of the expression level is greater than −0.65, and the ER level is classified as ER⁻ if the log 10(ratio) of the expression level is equal to or less than −0.65. In another embodiment, the ER status is evaluated based on the expression profile of a set of marker genes as described in PCT Publication No. WO 02/103320.

### 5.1.2 Marker Sets

[0046] The invention provides sets of genetic markers whose expression is correlated with the prognosis of breast cancer. These markers are listed as SEQ ID NOS: 1-387 herein. These markers are particularly useful in the prognosis of breast cancer in individuals of age 55 or older.

[0047] In one embodiment, the invention provides a set of 387 breast cancer prognosis-informative markers, i.e., markers that are significantly correlated with either a good or a poor outcome in breast cancer patients. These markers are listed in Tables 1, 3, 5 and 7 or in Tables 2, 4, 6 and 8. Tables 1 and 2 list the same markers; Tables 1, 3, 5 and 7 correlate particular markers with SEQ ID NOS for the 387 markers, and Tables 2, 4, 6 and 8 provide gene names and descriptions for each of the 387 markers. The invention also provides subsets of at least 10, 15, 20, 25, 30, 40, 50, 75, 100, 125, 150, or 175 of the different markers present in Tables 1, 3, 5 and 7 or in Tables 2, 4, 6 and 8, which are useful for prognosis of breast cancer in individuals having breast cancer, including age 55+ individuals. The invention further provides subsets of no more than 10, 15, 20, 25, 30, 40, 50, 75, 100, 125, 150, or 175 of the different markers in Tables 1, 3, 5 and 7 or in Tables 2, 4, 6 and 8, which are useful for prognosis of breast cancer in individuals having breast cancer, including age 55+ individuals. The invention further provides subsets of at least 10%, 15%, 20%, 25%, 30%, 40%, 50%, 60%, 70%, 80%, or 90% of the different markers listed in Tables 1, 3, 5 and 7 or in Tables 2, 4, 6 and 8. Preferably, a subset comprises all 387 different markers listed in Tables 1, 3, 5 and 7 or in Tables 2, 4, 6 and 8.

[0048] In one embodiment, the invention provides a set of 200 breast cancer prognosis-informative markers, i.e., markers that are significantly correlated with either a good or a poor outcome in breast cancer patients. These markers were identified using an algorithm previously described (see International Application Publication No. WO 02/103320), and are listed in Tables 1 and 2. Tables 1 and 2 list the same markers; Table 1 correlates particular markers with SEQ ID NOS for the 200 markers, and Table 2 provides gene names and descriptions for each of the 200 markers. The invention also provides subsets of at least 10, 15, 20, 25, 30, 40, 50, 75, 100, 125, 150, or 175 of the markers present in Tables 1 or 2, which are useful for prognosis of breast cancer in individuals having breast cancer, including age 55+ individuals. The invention further provides subsets of no more than 10, 15, 20, 25, 30, 40, 50, 75, 100, 125, 150, or 175 of the markers listed in Tables 1 or 2, which are useful for prognosis of breast cancer in individuals having breast cancer, including age 55+ individuals. The invention further provides subsets of at least 10%, 15%, 20%, 25%, 30%, 40%, 50%, 60%, 70%, 80%, or 90% of the markers listed in Table 1 or 2. Preferably, a subset comprises 100 of the markers, and even more preferably comprises all 200 markers listed in Table 1 or 2.

[0049] In another embodiment, the invention provides a set of 100 breast cancer prognosis-informative markers. These markers were identified by an iterative sample-exclusion method described elsewhere herein (see Example 3). These markers are listed in both Tables 3 and 4; Table 3 correlates particular markers with SEQ ID NOS for the 100 markers, and Table 4 provides gene names and descriptions for each of the 100 markers. The invention also provides subsets of at least 10, 15, 20, 25, 30, 40, 50 or 75 of the markers present in Table 3 or 4, which are useful for prognosis of breast cancer in individuals having breast cancer, including age 55+ individuals. The invention further provides subsets of no more than 10, 15, 20, 25, 30, 40, 50 or 75 of the markers present in Table 3 or 4, which are useful for prognosis of breast cancer in individuals having breast cancer, including age 55+ individuals. The invention further provides subsets of at least 10%, 15%, 20%, 25%, 30%, 40%, 50%, 60%, 70%, 80%, or 90% of the markers listed in Table 3 or 4. Preferably, a subset comprises 50 of the markers, and even more preferably comprises all 100 markers listed in Table 3 or 4.

[0050] In another embodiment, the invention provides a set of 200 breast cancer prognosis-informative markers, i.e., markers that are significantly correlated with either a good or a poor prognosis. These markers were identified using an algorithm previously described (see International Application Publication No. WO 02/103320) applied to samples from individuals with ER+ tumors. These markers are listed in Table 5 and 6. Table 5 and 6 list the same markers; Table 5 correlates particular markers with SEQ ID NOS for the 200 markers, and Table 6 provides gene names and descriptions for each of the 200 markers. The invention also provides subsets of at least 10, 15, 20, 25, 30, 40, 50, 75, 100, 125, 150, or 175 of the markers present in Table 5 or 6, which are particularly useful for prognosis of breast cancer in individuals having breast cancer, including age 55+, ER+ individuals. The invention further provides subsets of no more than 10, 15, 20, 25, 30, 40, 50, 75, 100, 125, 150, or 175 of the markers present in Table 5 or 6, which are particularly useful for prognosis of breast cancer in individuals having breast cancer, including age 55+ individuals with ER+ tumors. The invention further provides subsets of at least 10%, 15%, 20%, 25%, 30%, 40%, 50%, 60%, 70%, 80%, or 90% of the markers listed in Table 5 or 6. Preferably, a subset comprises 100 of the markers, and even more preferably comprises all 200 markers listed in Table 5 or 6.

[0051] In another embodiment, the invention provides a set of 100 breast cancer prognosis-informative markers. These markers were identified by an iterative sample-exclusion method described elsewhere herein (see Example 3) using ER+tumor samples. These markers are listed in both Table 7 and 8; Table 7 correlates particular markers with SEQ ID NOS for the 100 markers, and Table 8 provides gene names and descriptions for each of the 100 markers. The invention also provides subsets of at least 10, 15, 20, 25, 30, 40, 50 or 75 of the markers present in Table 7 or 8, which are useful for prognosis of breast cancer in individuals having breast cancer, including age 55+ individuals having ER+ tumors. The invention further provides subsets of no more than 10, 15, 20, 25, 30, 40, 50 or 75 of the markers present in Table 7 or 8, which are useful for prognosis of breast cancer in individuals having breast cancer, including age 55+ individuals having ER+ tumors. The invention further provides subsets of at least 10%, 15%, 20%, 25%, 30%, 40%, 50%, 60%, 70%, 80%, or 90% of the markers listed in Table 7 or 8. Preferably, a subset comprises 50 of the markers, and even more preferably comprises all 100 markers listed in Table 7 or 8.

[0052] In another embodiment, the invention provides subsets of at least 10, 15, 20, 25, 30, 40, 50, 75, 100, 125, 150, 175, 200, 225, 275, 300 or 350 of the markers listed in any one or more of Tables 1, 3, 5, and 7, or in any one or more of Tables 2, 4, 6, and 8. The invention further provides subsets of at least 10%, 15%, 20%, 25%, 30%, 40%, 50%, 60%, 70%, 80%, or 90% of the markers listed in any one or more of Tables 1, 3, 5, and 7, or in any one or more of Tables 2, 4, 6, and 8; that is, 10%, 15%, 20%, 25%, 30%, 40%, 50%, 60%, 70%, 80%, or 90% of the sequences of SEQ ID NOS:1-387. That is, prognosis-informative markers may be selected from any one or more of Tables 1, 3, 5, and 7, or any one or more of Tables 2, 4, 6, and 8, and used in the methods of the invention. In specific embodiments, preferred prognosis-informative markers are those derived from genes that encode kinases or cell cycle control proteins.

TABLE 1
200 prognosis markers identified by clustering method
previously described (“Nature method”)(Van't Veer et al. Nature
415(6871): 530-536(2002)).
Table 1

| Accession/ | |
|---|---|
| Contig No. | SEQ ID NO.: |
| AB007913 | SEQ ID NO 1 |
| AB029000 | SEQ ID NO 3 |
| AB033006 | SEQ ID NO 4 |
| AB033025 | SEQ ID NO 5 |
| AB033090 | SEQ ID NO 7 |
| AB033117 | SEQ ID NO 8 |
| AB037734 | SEQ ID NO 9 |
| AB037805 | SEQ ID NO 10 |
| AB040912 | SEQ ID NO 11 |
| AF052162 | SEQ ID NO 16 |
| AF067972 | SEQ ID NO 18 |
| AF121255 | SEQ ID NO 21 |
| AF154121 | SEQ ID NO 23 |
| AK000770 | SEQ ID NO 24 |
| AL050015 | SEQ ID NO 31 |
| AL050021 | SEQ ID NO 32 |
| AL080065 | SEQ ID NO 33 |
| AL080199 | SEQ ID NO 35 |
| AL117544 | SEQ ID NO 39 |
| AL133017 | SEQ ID NO 42 |
| AL133092 | SEQ ID NO 44 |
| AL137379 | SEQ ID NO 45 |
| AL137566 | SEQ ID NO 46 |
| AL137698 | SEQ ID NO 47 |
| D14678 | SEQ ID NO 49 |
| D25304 | SEQ ID NO 50 |
| D25328 | SEQ ID NO 51 |
| D42046 | SEQ ID NO 53 |
| D55716 | SEQ ID NO 54 |
| L19778 | SEQ ID NO 57 |
| L35035 | SEQ ID NO 59 |
| NM_000114 | SEQ ID NO 64 |
| NM_000147 | SEQ ID NO 65 |
| NM_000150 | SEQ ID NO 66 |
| NM_000587 | SEQ ID NO 69 |
| NM_000785 | SEQ ID NO 71 |
| NM_000876 | SEQ ID NO 73 |
| NM_000926 | SEQ ID NO 75 |
| NM_000927 | SEQ ID NO 76 |
| NM_000988 | SEQ ID NO 77 |
| NM_001034 | SEQ ID NO 78 |
| NM_001128 | SEQ ID NO 80 |
| NM_001310 | SEQ ID NO 85 |
| NM_001605 | SEQ ID NO 87 |
| NM_001673 | SEQ ID NO 89 |
| NM_001723 | SEQ ID NO 90 |
| NM_001762 | SEQ ID NO 91 |
| NM_001765 | SEQ ID NO 92 |
| NM_002001 | SEQ ID NO 97 |
| NM_002036 | SEQ ID NO 98 |
| NM_002428 | SEQ ID NO 104 |
| NM_002624 | SEQ ID NO 106 |
| NM_002837 | SEQ ID NO 107 |
| NM_002875 | SEQ ID NO 108 |
| NM_003005 | SEQ ID NO 110 |
| NM_003152 | SEQ ID NO 113 |
| NM_003160 | SEQ ID NO 114 |
| NM_003183 | SEQ ID NO 115 |
| NM_003243 | SEQ ID NO 117 |
| NM_003364 | SEQ ID NO 119 |
| NM_003504 | SEQ ID NO 120 |
| NM_003551 | SEQ ID NO 121 |
| NM_003559 | SEQ ID NO 122 |
| NM_003600 | SEQ ID NO 124 |
| NM_003686 | SEQ ID NO 126 |
| NM_003722 | SEQ ID NO 127 |
| NM_003864 | SEQ ID NO 130 |
| NM_003956 | SEQ ID NO 131 |
| NM_003981 | SEQ ID NO 133 |
| NM_004162 | SEQ ID NO 135 |
| NM_004203 | SEQ ID NO 136 |
| NM_004216 | SEQ ID NO 137 |
| NM_004217 | SEQ ID NO 138 |
| NM_004456 | SEQ ID NO 141 |
| NM_004526 | SEQ ID NO 142 |
| NM_004527 | SEQ ID NO 143 |
| NM_004603 | SEQ ID NO 144 |
| NM_004615 | SEQ ID NO 145 |
| NM_004642 | SEQ ID NO 147 |
| NM_004701 | SEQ ID NO 148 |
| NM_004774 | SEQ ID NO 149 |
| NM_004827 | SEQ ID NO 151 |
| NM_004861 | SEQ ID NO 152 |
| NM_004867 | SEQ ID NO 153 |
| NM_004944 | SEQ ID NO 155 |
| NM_005176 | SEQ ID NO 157 |
| NM_005269 | SEQ ID NO 160 |
| NM_005447 | SEQ ID NO 161 |
| NM_005721 | SEQ ID NO 164 |
| NM_005792 | SEQ ID NO 166 |
| NM_005856 | SEQ ID NO 167 |
| NM_006141 | SEQ ID NO 171 |
| NM_006461 | SEQ ID NO 175 |
| NM_006636 | SEQ ID NO 177 |
| NM_006826 | SEQ ID NO 179 |
| NM_006829 | SEQ ID NO 180 |
| NM_007057 | SEQ ID NO 184 |
| NM_012087 | SEQ ID NO 187 |
| NM_012291 | SEQ ID NO 189 |
| NM_012394 | SEQ ID NO 191 |
| NM_012453 | SEQ ID NO 194 |
| NM_012464 | SEQ ID NO 195 |
| NM_013242 | SEQ ID NO 196 |
| NM_013277 | SEQ ID NO 199 |
| NM_013999 | SEQ ID NO 201 |
| NM_014176 | SEQ ID NO 204 |
| NM_014251 | SEQ ID NO 205 |
| NM_014370 | SEQ ID NO 208 |
| NM_014669 | SEQ ID NO 209 |
| NM_014791 | SEQ ID NO 213 |
| NM_014926 | SEQ ID NO 214 |
| NM_015710 | SEQ ID NO 216 |
| NM_015969 | SEQ ID NO 217 |
| NM_015982 | SEQ ID NO 218 |
| NM_015987 | SEQ ID NO 219 |
| NM_017697 | SEQ ID NO 230 |
| NM_017870 | SEQ ID NO 231 |
| NM_017888 | SEQ ID NO 232 |
| NM_017899 | SEQ ID NO 233 |
| NM_017975 | SEQ ID NO 234 |
| NM_018114 | SEQ ID NO 237 |
| NM_018655 | SEQ ID NO 246 |
| NM_018659 | SEQ ID NO 247 |
| NM_018944 | SEQ ID NO 248 |
| NM_019013 | SEQ ID NO 249 |
| NM_020397 | SEQ ID NO 250 |
| NM_020980 | SEQ ID NO 252 |
| NM_020990 | SEQ ID NO 253 |
| NM_021128 | SEQ ID NO 256 |
| NM_021225 | SEQ ID NO 258 |
| S62027 | SEQ ID NO 259 |
| U20180 | SEQ ID NO 260 |
| U96131 | SEQ ID NO 264 |
| V00522 | SEQ ID NO 265 |
| Z26649 | SEQ ID NO 267 |
| NM_003158 | SEQ ID NO 269 |
| AW190932_RC | SEQ ID NO 270 |
| BE675111_RC | SEQ ID NO 271 |
| NM_018605 | SEQ ID NO 272 |
| NM_018692 | SEQ ID NO 273 |
| Contig1352_RC | SEQ ID NO 274 |
| Contig1938_RC | SEQ ID NO 275 |
| Contig3677_RC | SEQ ID NO 277 |
| Contig6796_RC | SEQ ID NO 278 |
| Contig8373_RC | SEQ ID NO 280 |
| Contig9810_RC | SEQ ID NO 281 |
| Contig32810 | SEQ ID NO 283 |
| Contig34952 | SEQ ID NO 284 |
| Contig35752 | SEQ ID NO 285 |
| Contig37540 | SEQ ID NO 286 |
| Contig47129 | SEQ ID NO 287 |
| Contig49875 | SEQ ID NO 288 |
| Contig50368 | SEQ ID NO 289 |
| Contig56307 | SEQ ID NO 290 |
| Contig62306 | SEQ ID NO 291 |
| Contig10007_RC | SEQ ID NO 292 |
| Contig13866_RC | SEQ ID NO 293 |
| Contig15750_RC | SEQ ID NO 294 |
| Contig16098_RC | SEQ ID NO 295 |
| Contig18374_RC | SEQ ID NO 297 |
| Contig24565_RC | SEQ ID NO 303 |
| Contig26492_RC | SEQ ID NO 307 |
| Contig27623_RC | SEQ ID NO 308 |
| Contig28286_RC | SEQ ID NO 309 |
| Contig29543_RC | SEQ ID NO 311 |
| Contig31885_RC | SEQ ID NO 315 |
| Contig34019_RC | SEQ ID NO 318 |
| Contig34154_RC | SEQ ID NO 319 |
| Contig34667_RC | SEQ ID NO 321 |
| Contig34766_RC | SEQ ID NO 322 |
| Contig35030_RC | SEQ ID NO 323 |
| Contig36243_RC | SEQ ID NO 324 |
| Contig37966_RC | SEQ ID NO 326 |
| Contig38901_RC | SEQ ID NO 328 |
| Contig39031_RC | SEQ ID NO 329 |
| Contig39795_RC | SEQ ID NO 330 |
| Contig41413_RC | SEQ ID NO 333 |
| Contig42103_RC | SEQ ID NO 336 |
| Contig43747_RC | SEQ ID NO 339 |
| Contig43898_RC | SEQ ID NO 341 |
| Contig44291_RC | SEQ ID NO 343 |
| Contig45441_RC | SEQ ID NO 345 |
| Contig45565_RC | SEQ ID NO 346 |
| Contig47308_RC | SEQ ID NO 352 |
| Contig48215_RC | SEQ ID NO 354 |
| Contig49270_RC | SEQ ID NO 356 |
| Contig49279_RC | SEQ ID NO 357 |
| Contig50900_RC | SEQ ID NO 363 |
| Contig52193_RC | SEQ ID NO 366 |
| Contig52543_RC | SEQ ID NO 368 |
| Contig53180_RC | SEQ ID NO 369 |
| Contig54096_RC | SEQ ID NO 370 |
| Contig54666_RC | SEQ ID NO 371 |
| Contig54895_RC | SEQ ID NO 372 |
| Contig55725_RC | SEQ ID NO 376 |
| Contig55883_RC | SEQ ID NO 377 |
| Contig55997_RC | SEQ ID NO 378 |
| Contig56298_RC | SEQ ID NO 379 |
| Contig56852_RC | SEQ ID NO 381 |
| Contig63649_RC | SEQ ID NO 387 |

TABLE 2
Accession/contig number, gene name, correlation to prognosis, and description for
each of the markers listed in Table 1.
Table 2.

| Accession/ | | | | |
|---|---|---|---|---|
| Contig No. | Gene | Corr | Name | Description |
| Z26649 | PLCB3 | 0.46 | PLCB3 | phospholipase C, beta 3 |
| | | | | (phosphatidylinositol-specific) |
| AF052162 | FLJ12443 | 0.43 | FLJ12443 | hypothetical protein FLJ12443 |
| AK000770 | B3GNT7 | 0.42 | B3GNT7 | UDP-GlcNAc:betaGal beta-1,3-N- |
| | | | | acetylglucosaminyltransferase 7 |
| AL133017 | FLJ22865 | 0.41 | FLJ22865 | hypothetical protein FLJ22865 |
| NM_019013 | FLJ10156 | 0.4 | FLJ10156 | hypothetical protein FLJ10156 |
| NM_001034 | RRM2 | 0.4 | RRM2 | ribonucleotide reductase M2 polypeptide |
| Contig54895_RC | FLJ12691 | 0.4 | GALNT14 | UDP-N-acetyl-alpha-D- |
| | | | | galactosamine:polypeptide N- |
| | | | | acetylgalactosaminyltransferase 14 |
| | | | | (GalNAc-T14) |
| AL137379 | FLJ13912 | 0.39 | FLJ13912 | hypothetical protein FLJ13912 |
| Contig38901_RC | MGC45866 | 0.38 | MGC45866 | hypothetical protein MGC45866 |
| Contig41413_RC | RRM2 | 0.38 | RRM2 | ribonucleotide reductase M2 polypeptide |
| NM_006636 | MTHFD2 | 0.38 | MTHFD2 | methylene tetrahydrofolate |
| | | | | dehydrogenase (NAD+ dependent), |
| | | | | methenyltetrahydrofolate cyclohydrolase |
| D25328 | PFKP | 0.38 | PFKP | phosphofructokinase, platelet |
| NM_013242 | GTL3 | 0.38 | GTL3 | likely ortholog of mouse gene trap locus 3 |
| NM_003600 | STK6 | 0.37 | STK6 | serine/threonine kinase 6 |
| NM_002875 | RAD51 | 0.37 | RAD51 | RAD51 homolog (RecA homolog, E. coli) |
| | | | | (S. cerevisiae) |
| NM_014791 | MELK | 0.37 | MELK | maternal embryonic leucine zipper kinase |
| NM_004217 | STK12 | 0.37 | AURKB | aurora kinase B |
| NM_004603 | STX1A | 0.37 | STX1A | syntaxin 1A (brain) |
| Contig35752 | CUL1 | 0.37 | CUL1 | cullin 1 |
| NM_003364 | UP | 0.37 | UPP1 | uridine phosphorylase 1 |
| Contig16098_RC | | 0.37 | | Homo sapiens transcribed sequences |
| AW190932_RC | GPI | 0.37 | GPI | xl66g09.x1 NCI_CGAP_Pan1 Homo |
| | | | | sapiens cDNA clone IMAGE: 2679712 3′, |
| | | | | mRNA sequence. |
| NM_003158 | STK6 | 0.36 | STK6 | Homo sapiens mRNA for aurora/IPL1- |
| | | | | related kinase, complete cds. |
| NM_020990 | CKMT1 | 0.36 | CKMT1 | creatine kinase, mitochondrial 1 |
| | | | | (ubiquitous) |
| Contig53180_RC | ADCY3 | 0.36 | MGC11266 | hypothetical protein MGC11266 |
| NM_003559 | PIP5K2B | 0.36 | PIP5K2B | phosphatidylinositol-4-phosphate 5- |
| | | | | kinase, type II, beta |
| Contig63649_RC | | 0.36 | | Homo sapiens cDNA FLJ41489 fis, clone |
| | | | | BRTHA2004582 |
| NM_006461 | SPAG5 | 0.35 | SPAG5 | sperm associated antigen 5 |
| NM_004642 | CDK2AP1 | 0.35 | CDK2AP1 | CDK2-associated protein 1 |
| NM_005792 | MPHOSPH6 | 0.35 | MPHOSPH6 | M-phase phosphoprotein 6 |
| Contig18374_RC | LYPLA3 | 0.35 | LYPLA3 | lysophospholipase 3 (lysosomal |
| | | | | phospholipase A2) |
| NM_003183 | ADAM17 | 0.35 | ADAM17 | a disintegrin and metalloproteinase |
| | | | | domain 17 (tumor necrosis factor, alpha, |
| | | | | converting enzyme) |
| NM_015969 | MRPS17 | 0.35 | MRPS17 | mitochondrial ribosomal protein S17 |
| NM_017975 | FLJ10036 | 0.35 | FLJ10036 | hypothetical protein FLJ10036 |
| Contig39031_RC | FLJ37312 | 0.35 | PTP9Q22 | protein tyrosine phosphatase PTP9Q22 |
| AF154121 | SLC13A3 | 0.35 | SLC13A3 | solute carrier family 13 (sodium- |
| | | | | dependent dicarboxylate transporter), |
| | | | | member 3 |
| Contig28286_RC | | 0.35 | | Homo sapiens transcribed sequences |
| NM_004216 | DEDD | 0.35 | DEDD | death effector domain containing |
| Contig13866_RC | | 0.35 | | Homo sapiens transcribed sequences |
| Contig49270_RC | KIAA1553 | 0.34 | KIAA1553 | KIAA1553 |
| D42046 | DNA2L | 0.34 | DNA2L | DNA2 DNA replication helicase 2-like |
| | | | | (yeast) |
| AF067972 | DNMT3A | 0.34 | DNMT3A | DNA (cytosine-5-)-methyltransferase 3 |
| | | | | alpha |
| Contig47129 | MGC22014 | 0.34 | MGC22014 | hypothetical protein MGC22014 |
| Contig35030_RC | LOC91689 | 0.34 | RDH10 | retinol dehydrogenase 10 (all-trans) |
| AB033006 | NDRG4 | 0.34 | NDRG4 | NDRG family member 4 |
| NM_003864 | SAP30 | 0.34 | SAP30 | sin3-associated polypeptide, 30 kDa |
| Contig56298_RC | FLJ13154 | 0.34 | FLJ13154 | hypothetical protein FLJ13154 |
| NM_018114 | WDR6 | 0.34 | FLJ10496 | hypothetical protein FLJ10496 |
| BE675111_RC | FLJ20374 | 0.34 | Rpp25 | RNase P protein subunit p25 |
| NM_015982 | YBX2 | 0.34 | YBX2 | germ cell specific Y-box binding protein |
| Contig34019_RC | MGC15827 | 0.34 | MGC15827 | hypothetical protein MGC15827 |
| NM_004861 | CST | 0.34 | CST | cerebroside (3′- |
| | | | | phosphoadenylylsulfate:galactosylceramide |
| | | | | 3′) sulfotransferase |
| AB033117 | XPO5 | 0.34 | XPO5 | exportin 5 |
| Contig44291_RC | FLJ21415 | 0.34 | FLJ21415 | hypothetical protein FLJ21415 |
| Contig29543_RC | 0.34 | FLJ30594 | hypothetical | |
| | | | protein | |
| | | | FLJ30594 | |
| NM_014370 | STK23 | 0.34 | STK23 | serine/threonine kinase 23 |
| Contig6796_RC | 0.34 | | Homo | |
| | | | sapiens | |
| | | | transcribed | |
| | | | sequences | |
| NM_014176 | HSPC150 | 0.33 | HSPC150 | HSPC150 protein similar to ubiquitin- |
| | | | | conjugating enzyme |
| D14678 | KIFC1 | 0.33 | KIFC1 | kinesin family member C1 |
| NM_001762 | CCT6A | 0.33 | CCT6A | chaperonin containing TCP1, subunit 6A |
| | | | | (zeta 1) |
| Contig3677_RC | CBFB | 0.33 | CBFB | core-binding factor, beta subunit |
| NM_017697 | FLJ20171 | 0.33 | FLJ20171 | hypothetical protein FLJ20171 |
| AL050021 | | 0.33 | SLC7A1 | solute carrier family 7 (cationic amino |
| | | | | acid transporter, y+ system), member 1 |
| NM_014251 | SLC25A13 | 0.33 | SLC25A13 | solute carrier family 25, member 13 |
| | | | | (citrin) |
| NM_014669 | KIAA0095 | 0.33 | KIAA0095 | KIAA0095 gene product |
| Contig37966_RC | MGC15482 | 0.33 | MGC15482 | F-box protein FBL2 |
| Contig54096_RC | CKMT1 | 0.33 | CKMT1 | creatine kinase, mitochondrial 1 |
| | | | | (ubiquitous) |
| NM_001128 | AP1G1 | 0.33 | AP1G1 | adaptor-related protein complex 1, |
| | | | | gamma 1 subunit |
| NM_001605 | AARS | 0.33 | AARS | alanyl-tRNA synthetase |
| NM_000785 | CYP27B1 | 0.33 | CYP27B1 | cytochrome P450, family 27, subfamily B, |
| | | | | polypeptide 1 |
| NM_012453 | TBL2 | 0.33 | TBL2 | transducin (beta)-like 2 |
| U20180 | IREB2 | 0.33 | IREB2 | iron-responsive element binding protein 2 |
| NM_003160 | STK13 | 0.33 | AURKC | aurora kinase C |
| NM_007057 | ZWINT | 0.33 | ZWINT | ZW10 interactor |
| NM_004203 | RBL2 | 0.33 | PKMYT1 | membrane-associated tyrosine- and |
| | | | | threonine-specific cdc2-inhibitory kinase |
| NM_012394 | PFDN2 | 0.33 | PFDN2 | prefoldin 2 |
| NM_012087 | GTF3C5 | 0.33 | GTF3C5 | general transcription factor IIIC, |
| | | | | polypeptide 5, 63 kDa |
| Contig48215_RC | FLJ35801 | 0.33 | FLJ35801 | hypothetical protein FLJ35801 |
| NM_000150 | FUT6 | 0.33 | FUT6 | fucosyltransferase 6 (alpha (1,3) |
| | | | | fucosyltransferase) |
| Contig36243_RC | | 0.33 | DKFZP434A1022 | hypothetical protein DKFZp434A1022 |
| NM_004701 | CCNB2 | 0.32 | CCNB2 | cyclin B2 |
| NM_003981 | PRC1 | 0.32 | PRC1 | protein regulator of cytokinesis 1 |
| U96131 | TRIP13 | 0.32 | TRIP13 | thyroid hormone receptor interactor 13 |
| NM_003686 | EXO1 | 0.32 | EXO1 | exonuclease 1 |
| Contig34952 | SHCBP1 | 0.32 | SHCBP1 | likely ortholog of mouse Shc SH2-domain |
| | | | | binding protein 1 |
| NM_013277 | RACGAP1 | 0.32 | RACGAP1 | Rac GTPase activating protein 1 |
| NM_012291 | ESPL1 | 0.32 | ESPL1 | extra spindle poles like 1 (S. cerevisiae) |
| NM_005721 | ACTR3 | 0.32 | ACTR3 | ARP3 actin-related protein 3 homolog |
| | | | | (yeast) |
| NM_006826 | YWHAQ | 0.32 | YWHAQ | tyrosine 3-monooxygenase/tryptophan 5- |
| | | | | monooxygenase activation protein, theta |
| | | | | polypeptide |
| NM_004456 | EZH2 | 0.32 | EZH2 | enhancer of zeste homolog 2 |
| | | | | (Drosophila) |
| NM_004162 | RAB5A | 0.32 | RAB5A | RAB5A, member RAS oncogene family |
| Contig62306 | C21orf45 | 0.32 | C21orf45 | chromosome 21 open reading frame 45 |
| NM_001673 | ASNS | 0.32 | ASNS | asparagine synthetase |
| NM_020980 | AQP9 | 0.32 | AQP9 | aquaporin 9 |
| Contig50900_RC | LOC124491 | 0.32 | LOC124491 | LOC124491 |
| NM_018655 | LENEP | 0.32 | LENEP | lens epithelial protein |
| Contig1352_RC | FLJ36874 | 0.32 | FLJ36874 | hypothetical protein FLJ36874 |
| NM_020397 | CKLiK | 0.32 | CAMK1D | calcium/calmodulin-dependent protein |
| | | | | kinase ID |
| Contig34766_RC | LOC151648 | 0.32 | LOC151648 | hypothetical protein BC001339 |
| S62027 | GNGT1 | 0.32 | GNGT1 | guanine nucleotide binding protein (G |
| | | | | protein), gamma transducing activity |
| | | | | polypeptide 1 |
| NM_000876 | IGF2R | 0.32 | IGF2R | insulin-like growth factor 2 receptor |
| NM_002428 | MMP15 | 0.32 | MMP15 | matrix metalloproteinase 15 (membrane- |
| | | | | inserted) |
| Contig43898_RC | | 0.32 | FLJ39575 | hypothetical protein FLJ39575 |
| NM_003504 | CDC45L | 0.31 | CDC45L | CDC45 cell division cycle 45-like (S. cerevisiae) |
| Contig55997_RC | | 0.31 | | Homo sapiens cDNA clone |
| | | | | IMAGE: 4448513, partial cds |
| D55716 | MCM7 | 0.31 | MCM7 | MCM7 minichromosome maintenance |
| | | | | deficient 7 (S. cerevisiae) |
| NM_004526 | MCM2 | 0.31 | MCM2 | MCM2 minichromosome maintenance |
| | | | | deficient 2, mitotin (S. cerevisiae) |
| Contig55725_RC | CDCA7 | 0.31 | CDCA7 | cell division cycle associated 7 |
| L35035 | RPIA | 0.31 | RPIA | ribose 5-phosphate isomerase A (ribose |
| | | | | 5-phosphate epimerase) |
| NM_004774 | PPARBP | 0.31 | PPARBP | PPAR binding protein |
| NM_017870 | FLJ20539 | 0.31 | GBP | likely ortholog of rat GRP78-binding |
| | | | | protein |
| L19778 | HIST1H2AG | 0.31 | HIST1H2AG | histone 1, H2ag |
| AB033025 | KIAA1199 | 0.31 | KIAA1199 | KIAA1199 protein |
| AB029000 | KIAA1077 | 0.31 | SULF1 | sulfatase 1 |
| NM_006141 | DNCLI2 | 0.31 | DNCLI2 | dynein, cytoplasmic, light intermediate |
| | | | | polypeptide 2 |
| AF121255 | EIF2C2 | 0.31 | EIF2C2 | eukaryotic translation initiation factor 2C, 2 |
| NM_018944 | C21orf45 | 0.31 | C21orf45 | chromosome 21 open reading frame 45 |
| AB007913 | CHD5 | 0.31 | CHD5 | chromodomain helicase DNA binding |
| | | | | protein 5 |
| Contig24565_RC | MGC3077 | 0.31 | C7orf24 | chromosome 7 open reading frame 24 |
| Contig49875 | | −0.31 | | Homo sapiens full length insert cDNA |
| | | | | YN61C04 |
| NM_000927 | ABCB1 | −0.31 | ABCB1 | ATP-binding cassette, sub-family B |
| | | | | (MDR/TAP), member 1 |
| AB033090 | PAK7 | −0.31 | PAK7 | p21(CDKN1A)-activated kinase 7 |
| NM_021225 | PROL1 | −0.31 | PROL1 | proline rich 1 |
| Contig9810_RC | KCNE1 | −0.31 | KCNE1 | potassium voltage-gated channel, Isk- |
| | | | | related family, member 1 |
| Contig39795_RC | RASA1 | −0.31 | RASA1 | cyclin H |
| NM_001310 | CREBL2 | −0.31 | CREBL2 | cAMP responsive element binding |
| | | | | protein-like 2 |
| AL050015 | DKFZP564O243 | −0.31 | DKFZP564O243 | DKFZP564O243 protein |
| NM_002624 | PFDN5 | −0.31 | PFDN5 | prefoldin 5 |
| NM_021128 | POLR2L | −0.31 | POLR2L | polymerase (RNA) II (DNA directed) |
| | | | | polypeptide L, 7.6 kDa |
| NM_006829 | APM2 | −0.31 | APM2 | adipose specific 2 |
| NM_003005 | SELP | −0.31 | SELP | selectin P (granule membrane protein |
| | | | | 140 kDa, antigen CD62) |
| NM_012464 | TLL1 | −0.31 | TLL1 | tolloid-like 1 |
| NM_014926 | KIAA0848 | −0.31 | KIAA0848 | KIAA0848 protein |
| NM_000988 | RPL27 | −0.31 | RPL27 | ribosomal protein L27 |
| NM_001723 | BPAG1 | −0.32 | BPAG1 | bullous pemphigoid antigen 1, |
| | | | | 230/240 kDa |
| NM_018605 | PRO1777 | −0.32 | C13orf10 | chromosome 13 open reading frame 10 |
| AB037805 | KIAA1384 | −0.32 | KIAA1384 | KIAA1384 protein |
| Contig56852_RC | LRRN3 | −0.32 | LRRN3 | leucine rich repeat neuronal 3 |
| Contig31885_RC | | −0.32 | LOC147463 | hypothetical protein LOC147463 |
| NM_000147 | FUCA1 | −0.32 | FUCA1 | fucosidase, alpha-L-1, tissue |
| Contig34667_RC | LAK-4P | −0.32 | EVER1 | KIAA1582 protein |
| D25304 | ARHGEF6 | −0.32 | ARHGEF6 | Rac/Cdc42 guanine nucleotide exchange |
| | | | | factor (GEF) 6 |
| NM_005856 | RAMP3 | −0.32 | RAMP3 | receptor (calcitonin) activity modifying |
| | | | | protein 3 |
| NM_003551 | NME5 | −0.32 | NME5 | non-metastatic cells 5, protein expressed |
| | | | | in (nucleoside-diphosphate kinase) |
| V00522 | HLA-DRB3 | −0.32 | HLA-DRB3 | major histocompatibility complex, class II, |
| | | | | DR beta 3 |
| Contig54666_RC | C2orf9 | −0.32 | C2orf9 | chromosome 2 open reading frame 9 |
| AL133092 | DKFZp434I0428 | −0.32 | DISP1 | dispatched homolog 1 (Drosophila) |
| Contig32810 | | −0.32 | | Homo sapiens LOC374363 |
| | | | | (LOC374363), mRNA |
| AL137698 | DKFZp434C1915 | −0.32 | PGM5 | phosphoglucomutase 5 |
| Contig42103_RC | | −0.33 | C20orf17 | chromosome 20 open reading frame 17 |
| NM_001765 | CD1C | −0.33 | CD1C | CD1C antigen, c polypeptide |
| NM_018692 | C20orf17 | −0.33 | C20orf17 | chromosome 20 open reading frame 17 |
| NM_003722 | TP73L | −0.33 | TP73L | tumor protein p73-like |
| Contig15750_RC | | −0.33 | | Homo sapiens cDNA FLJ26876 fis, clone |
| | | | | PRS09003 |
| Contig55883_RC | | −0.33 | | Homo sapiens transcribed sequences |
| AL137566 | | −0.33 | | Homo sapiens mRNA; cDNA |
| | | | | DKFZp686A0815 (from clone |
| | | | | DKFZp686A0815) |
| NM_003243 | TGFBR3 | −0.33 | TGFBR3 | transforming growth factor, beta receptor |
| | | | | III (betaglycan, 300 kDa) |
| NM_005176 | ATP5G2 | −0.33 | ATP5G2 | ATP synthase, H+ transporting, |
| | | | | mitochondrial F0 complex, subunit c |
| | | | | (subunit 9), isoform 2 |
| Contig52543_RC | MGC29761 | −0.33 | MGC29761 | hypothetical protein MGC29761 |
| NM_005269 | GLI | −0.33 | GLI | glioma-associated oncogene homolog |
| | | | | (zinc finger protein) |
| NM_018659 | C17 | −0.33 | C17 | cytokine-like protein C17 |
| NM_017888 | FLJ20581 | −0.33 | FLJ20581 | hypothetical protein FLJ20581 |
| NM_004827 | ABCG2 | −0.33 | ABCG2 | ATP-binding cassette, sub-family G |
| | | | | (WHITE), member 2 |
| AL080065 | DKFZP564J102 | −0.33 | DKFZP564J102 | DKFZP564J102 protein |
| Contig27623_RC | | −0.33 | | Homo sapiens transcribed sequences |
| NM_002036 | FY | −0.34 | FY | Duffy blood group |
| Contig47308_RC | | −0.34 | | Homo sapiens hypothetical gene |
| | | | | supported by NM_018692 (LOC374296), |
| | | | | mRNA |
| Contig26492_RC | C12orf6 | −0.34 | C12orf6 | chromosome 12 open reading frame 6 |
| AL080199 | ELOVL2 | −0.34 | ELOVL2 | elongation of very long chain fatty acids |
| | | | | (FEN1/Elo2, SUR4/Elo3, yeast)-like 2 |
| NM_000926 | PGR | −0.34 | PGR | progesterone receptor |
| Contig34154_RC | | −0.34 | | Homo sapiens transcribed sequence with |
| | | | | strong similarity to protein |
| | | | | ref: NP_113668.1 (H. sapiens) |
| | | | | hypothetical protein AD034 [Homo |
| | | | | sapiens] |
| NM_003152 | STAT5A | −0.34 | STAT5A | signal transducer and activator of |
| | | | | transcription 5A |
| Contig43747_RC | MGC7036 | −0.34 | MGC7036 | hypothetical protein MGC7036 |
| Contig10007_RC | | −0.34 | | Homo sapiens similar to MHC HLA-SX- |
| | | | | alpha (LOC377373), mRNA |
| NM_013999 | MEOX1 | −0.35 | MEOX1 | mesenchyme homeo box 1 |
| NM_000587 | C7 | −0.35 | C7 | complement component 7 |
| Contig52193_RC | | −0.35 | ABCB1 | ATP-binding cassette, sub-family B |
| | | | | (MDR/TAP), member 1 |
| AB040912 | SEMA6D | −0.35 | SEMA6D | sema domain, transmembrane domain |
| | | | | (TM), and cytoplasmic domain, |
| | | | | (semaphorin) 6D |
| Contig56307 | C1orf21 | −0.35 | C1orf21 | chromosome 1 open reading frame 21 |
| AL117544 | DKFZP434I092 | −0.35 | DKFZP434I092 | DKFZP434I092 protein |
| NM_005447 | PAMCI | −0.35 | PAMCI | peptidylglycine alpha-amidating |
| | | | | monooxygenase COOH-terminal |
| | | | | interactor |
| Contig1938_RC | CAB56184 | −0.35 | CAB56184 | GlcNAc-phosphotransferase gamma- |
| | | | | subunit |
| NM_015710 | GLTSCR2 | −0.35 | GLTSCR2 | glioma tumor suppressor candidate |
| | | | | region gene 2 |
| NM_002837 | PTPRB | −0.35 | PTPRB | protein tyrosine phosphatase, receptor |
| | | | | type, B |
| Contig45565_RC | FLJ25162 | −0.35 | FLJ25162 | Homo sapiens cDNA FLJ25135 fis, clone |
| | | | | CBR06974. |
| NM_003956 | CH25H | −0.36 | CH25H | cholesterol 25-hydroxylase |
| Contig45441_RC | | −0.36 | LOC284542 | hypothetical protein LOC284542 |
| Contig37540 | | −0.36 | | Homo sapiens transcribed sequence with |
| | | | | weak similarity to protein |
| | | | | ref: NP_009056.1 (H. sapiens) |
| | | | | ubiquitously transcribed tetratricopeptide |
| | | | | repeat gene, Y chromosome; |
| | | | | Ubiquitously transcribed TPR gene on Y |
| | | | | chromosome [Homo sapiens] |
| Contig8373_RC | | −0.36 | | Homo sapiens transcribed sequence with |
| | | | | weak similarity to protein |
| | | | | ref: NP_060312.1 (H. sapiens) |
| | | | | hypothetical protein FLJ20489 [Homo |
| | | | | sapiens] |
| Contig50368 | | −0.36 | | cDNA encoding novel polypeptide from |
| | | | | human umbilical vein endothelial cell. |
| NM_000114 | EDN3 | −0.37 | EDN3 | endothelin 3 |
| NM_004944 | DNASE1L3 | −0.38 | DNASE1L3 | deoxyribonuclease I-like 3 |
| NM_017899 | TSC | −0.38 | TSC | hypothetical protein FLJ20607 |
| Contig49279_RC | | −0.38 | FLJ25461 | hypothetical protein FLJ25461 |
| NM_002001 | FCER1A | −0.38 | FCER1A | Fc fragment of IgE, high affinity I, |
| | | | | receptor for; alpha polypeptide |
| AB037734 | PCDH19 | −0.38 | PCDH19 | protocadherin 19 |
| NM_015987 | HEBP1 | −0.38 | HEBP1 | heme binding protein 1 |
| NM_004615 | TM4SF2 | −0.39 | TM4SF2 | transmembrane 4 superfamily member 2 |
| NM_004527 | MEOX1 | −0.39 | MEOX1 | mesenchyme homeo box 1 |
| NM_004867 | ITM2A | −0.39 | ITM2A | integral membrane protein 2A |

TABLE 3
100 prognosis markers identified by an iterative method.
Table 3.

| Accession/ | |
|---|---|
| Contig No. | SEQ ID NO.: |
| AB024704 | SEQ ID NO 2 |
| AF016495 | SEQ ID NO 13 |
| AF025441 | SEQ ID NO 14 |
| AF052162 | SEQ ID NO 16 |
| AK001166 | SEQ ID NO 25 |
| AL133017 | SEQ ID NO 42 |
| AL137698 | SEQ ID NO 47 |
| D14678 | SEQ ID NO 49 |
| D25328 | SEQ ID NO 51 |
| D38553 | SEQ ID NO 52 |
| D42046 | SEQ ID NO 53 |
| D55716 | SEQ ID NO 54 |
| D86978 | SEQ ID NO 55 |
| M96577 | SEQ ID NO 60 |
| NM_000291 | SEQ ID NO 67 |
| NM_001034 | SEQ ID NO 78 |
| NM_001071 | SEQ ID NO 79 |
| NM_001211 | SEQ ID NO 81 |
| NM_001237 | SEQ ID NO 83 |
| NM_001274 | SEQ ID NO 84 |
| NM_001762 | SEQ ID NO 91 |
| NM_001809 | SEQ ID NO 94 |
| NM_002001 | SEQ ID NO 97 |
| NM_002358 | SEQ ID NO 102 |
| NM_002466 | SEQ ID NO 105 |
| NM_002875 | SEQ ID NO 108 |
| NM_003090 | SEQ ID NO 112 |
| NM_003152 | SEQ ID NO 113 |
| NM_003318 | SEQ ID NO 118 |
| NM_003504 | SEQ ID NO 120 |
| NM_003551 | SEQ ID NO 121 |
| NM_003579 | SEQ ID NO 123 |
| NM_003600 | SEQ ID NO 124 |
| NM_003686 | SEQ ID NO 126 |
| NM_003981 | SEQ ID NO 133 |
| NM_004153 | SEQ ID NO 134 |
| NM_004217 | SEQ ID NO 138 |
| NM_004336 | SEQ ID NO 139 |
| NM_004456 | SEQ ID NO 141 |
| NM_004526 | SEQ ID NO 142 |
| NM_004527 | SEQ ID NO 143 |
| NM_004615 | SEQ ID NO 145 |
| NM_004631 | SEQ ID NO 146 |
| NM_004701 | SEQ ID NO 148 |
| NM_004887 | SEQ ID NO 154 |
| NM_005192 | SEQ ID NO 158 |
| NM_005721 | SEQ ID NO 164 |
| NM_005733 | SEQ ID NO 165 |
| NM_005915 | SEQ ID NO 168 |
| NM_006027 | SEQ ID NO 169 |
| NM_006461 | SEQ ID NO 175 |
| NM_006636 | SEQ ID NO 177 |
| NM_006845 | SEQ ID NO 181 |
| NM_007019 | SEQ ID NO 183 |
| NM_007057 | SEQ ID NO 184 |
| NM_012310 | SEQ ID NO 190 |
| NM_012412 | SEQ ID NO 192 |
| NM_013242 | SEQ ID NO 196 |
| NM_013277 | SEQ ID NO 199 |
| NM_014176 | SEQ ID NO 204 |
| NM_014251 | SEQ ID NO 205 |
| NM_014317 | SEQ ID NO 207 |
| NM_014736 | SEQ ID NO 210 |
| NM_014773 | SEQ ID NO 212 |
| NM_014791 | SEQ ID NO 213 |
| NM_015987 | SEQ ID NO 219 |
| NM_016101 | SEQ ID NO 221 |
| NM_016359 | SEQ ID NO 223 |
| NM_017613 | SEQ ID NO 227 |
| NM_018101 | SEQ ID NO 236 |
| NM_018131 | SEQ ID NO 238 |
| NM_018410 | SEQ ID NO 243 |
| NM_018518 | SEQ ID NO 245 |
| NM_019013 | SEQ ID NO 249 |
| NM_020675 | SEQ ID NO 251 |
| NM_020980 | SEQ ID NO 252 |
| U74612 | SEQ ID NO 262 |
| U81002 | SEQ ID NO 263 |
| U96131 | SEQ ID NO 264 |
| X74794 | SEQ ID NO 266 |
| NM_003158 | SEQ ID NO 269 |
| Contig173 | SEQ ID NO 282 |
| Contig34952 | SEQ ID NO 284 |
| Contig37540 | SEQ ID NO 286 |
| Contig28947_RC | SEQ ID NO 310 |
| Contig33814_RC | SEQ ID NO 317 |
| Contig34766_RC | SEQ ID NO 322 |
| Contig38901_RC | SEQ ID NO 328 |
| Contig40120_RC | SEQ ID NO 331 |
| Contig41413_RC | SEQ ID NO 333 |
| Contig45032_RC | SEQ ID NO 344 |
| Contig45816_RC | SEQ ID NO 347 |
| Contig47793_RC | SEQ ID NO 353 |
| Contig49270_RC | SEQ ID NO 356 |
| Contig50841_RC | SEQ ID NO 362 |
| Contig52543_RC | SEQ ID NO 368 |
| Contig54895_RC | SEQ ID NO 372 |
| Contig55725_RC | SEQ ID NO 376 |
| Contig55997_RC | SEQ ID NO 378 |
| Contig57584_RC | SEQ ID NO 382 |
| NM_006845 | SEQ ID NO 181 |
| NM_007019 | SEQ ID NO 183 |
| NM_007057 | SEQ ID NO 184 |
| NM_012310 | SEQ ID NO 190 |

TABLE 4
Accession/contig number, gene name, correlation to prognosis, and description for
each of the markers listed in Table 3.
Table 4.

| Accession/ | | | | |
|---|---|---|---|---|
| Contig No. | Gene | Corr | Name | Description |
| Contig41413_RC | RRM2 | 0.66 | RRM2 | ribonucleotide reductase M2 polypeptide |
| NM_014791 | MELK | 0.65 | MELK | maternal embryonic leucine zipper kinase |
| NM_004701 | CCNB2 | 0.65 | CCNB2 | cyclin B2 |
| NM_001034 | RRM2 | 0.65 | RRM2 | ribonucleotide reductase M2 polypeptide |
| Contig38901_RC | MGC45866 | 0.65 | MGC45866 | hypothetical protein MGC45866 |
| NM_003504 | CDC45L | 0.65 | CDC45L | CDC45 cell division cycle 45-like (S. cerevisiae) |
| NM_002875 | RAD51 | 0.63 | RAD51 | RAD51 homolog (RecA homolog, E. coli) |
| | | | | (S. cerevisiae) |
| NM_003158 | STK6 | 0.61 | STK6 | Homo sapiens mRNA for aurora/IPL1- |
| | | | | related kinase, complete cds. |
| NM_013277 | RACGAP1 | 0.61 | RACGAP1 | Rac GTPase activating protein 1 |
| NM_006636 | MTHFD2 | 0.61 | MTHFD2 | methylene tetrahydrofolate |
| | | | | dehydrogenase (NAD+ dependent), |
| | | | | methenyltetrahydrofolate cyclohydrolase |
| NM_003686 | EXO1 | 0.6 | EXO1 | exonuclease 1 |
| NM_012310 | KIF4A | 0.6 | KIF4A | kinesin family member 4A |
| NM_004217 | STK12 | 0.6 | AURKB | aurora kinase B |
| NM_002466 | MYBL2 | 0.6 | MYBL2 | v-myb myeloblastosis viral oncogene |
| | | | | homolog (avian)-like 2 |
| NM_003600 | STK6 | 0.59 | STK6 | serine/threonine kinase 6 |
| D55716 | MCM7 | 0.59 | MCM7 | MCM7 minichromosome maintenance |
| | | | | deficient 7 (S. cerevisiae) |
| NM_018410 | DKFZp762E1312 | 0.58 | DKFZp762E1312 | hypothetical protein DKFZp762E1312 |
| U96131 | TRIP13 | 0.58 | TRIP13 | thyroid hormone receptor interactor 13 |
| Contig55997_RC | | 0.58 | | Homo sapiens cDNA clone |
| | | | | IMAGE: 4448513, partial cds |
| NM_002358 | MAD2L1 | 0.58 | MAD2L1 | MAD2 mitotic arrest deficient-like 1 |
| | | | | (yeast) |
| NM_001237 | CCNA2 | 0.58 | CCNA2 | cyclin A2 |
| NM_017613 | DONSON | 0.58 | DONSON | downstream neighbor of SON |
| AB024704 | C20orf1 | 0.58 | C20orf1 | TPX2, microtubule-associated protein |
| | | | | homolog (Xenopus laevis) |
| Contig40120_RC | DCTN1 | 0.58 | SLC4A5 | solute carrier family 4, sodium |
| | | | | bicarbonate cotransporter, member 5 |
| NM_006027 | EXO1 | 0.57 | EXO1 | exonuclease 1 |
| NM_005733 | KIF20A | 0.57 | KIF20A | kinesin family member 20A |
| NM_003981 | PRC1 | 0.57 | PRC1 | protein regulator of cytokinesis 1 |
| NM_004456 | EZH2 | 0.57 | EZH2 | enhancer of zeste homolog 2 |
| | | | | (Drosophila) |
| Contig50841_RC | LOC113115 | 0.57 | DUFD1 | Homo sapiens DUF729 domain |
| | | | | containing 1, mRNA (cDNA clone |
| | | | | MGC: 19798 IMAGE: 3926284), complete |
| | | | | cds. |
| NM_019013 | FLJ10156 | 0.57 | FLJ10156 | hypothetical protein FLJ10156 |
| NM_004526 | MCM2 | 0.57 | MCM2 | MCM2 minichromosome maintenance |
| | | | | deficient 2, mitotin (S. cerevisiae) |
| NM_013242 | GTL3 | 0.57 | GTL3 | likely ortholog of mouse gene trap locus 3 |
| D25328 | PFKP | 0.57 | PFKP | phosphofructokinase, platelet |
| NM_004336 | BUB1 | 0.56 | BUB1 | BUB1 budding uninhibited by |
| | | | | benzimidazoles 1 homolog (yeast) |
| NM_001809 | CENPA | 0.56 | CENPA | centromere protein A, 17 kDa |
| D38553 | BRRN1 | 0.56 | BRRN1 | barren homolog (Drosophila) |
| NM_018518 | MCM10 | 0.56 | MCM10 | MCM10 minichromosome maintenance |
| | | | | deficient 10 (S. cerevisiae) |
| NM_016359 | ANKT | 0.56 | NUSAP1 | nucleolar and spindle associated protein 1 |
| Contig34952 | SHCBP1 | 0.56 | SHCBP1 | likely ortholog of mouse Shc SH2-domain |
| | | | | binding protein 1 |
| U74612 | FOXM1 | 0.56 | FOXM1 | forkhead box M1 |
| NM_003579 | RAD54L | 0.56 | RAD54L | RAD54-like (S. cerevisiae) |
| NM_018101 | FLJ10468 | 0.56 | CDCA8 | cell division cycle associated 8 |
| NM_006461 | SPAG5 | 0.56 | SPAG5 | sperm associated antigen 5 |
| X74794 | MCM4 | 0.56 | MCM4 | MCM4 minichromosome maintenance |
| | | | | deficient 4 (S. cerevisiae) |
| NM_004631 | LRP8 | 0.56 | LRP8 | low density lipoprotein receptor-related |
| | | | | protein 8, apolipoprotein e receptor |
| NM_014736 | KIAA0101 | 0.56 | KIAA0101 | KIAA0101 gene product |
| Contig34766_RC | LOC151648 | 0.56 | LOC151648 | hypothetical protein BC001339 |
| AF052162 | FLJ12443 | 0.56 | FLJ12443 | hypothetical protein FLJ12443 |
| NM_020675 | AD024 | 0.55 | AD024 | AD024 protein |
| Contig45032_RC | FLJ14813 | 0.55 | FLJ14813 | hypothetical protein FLJ14813 |
| NM_005192 | CDKN3 | 0.55 | CDKN3 | cyclin-dependent kinase inhibitor 3 |
| | | | | (CDK2-associated dual specificity |
| | | | | phosphatase) |
| Contig47793_RC | FLJ23311 | 0.55 | FLJ23311 | FLJ23311 protein |
| Contig57584_RC | GRCC8 | 0.55 | CDCA3 | cell division cycle associated 3 |
| Contig173 | C20orf178 | 0.55 | C20orf178 | dehydrogenase E1 and transketolase |
| | | | | domain containing 1 |
| NM_016101 | HSPC031 | 0.55 | CGI-37 | comparative gene identification transcript |
| | | | | 37 |
| NM_020980 | AQP9 | 0.55 | AQP9 | aquaporin 9 |
| NM_007057 | ZWINT | 0.55 | ZWINT | ZW10 interactor |
| NM_005915 | MCM6 | 0.54 | MCM6 | MCM6 minichromosame maintenance |
| | | | | deficient 6 (MIS5 homolog, S. pombe) (S. cerevisiae) |
| D42046 | DNA2L | 0.54 | DNA2L | DNA2 DNA replication helicase 2-like |
| | | | | (yeast) |
| U81002 | FLJ14502 | 0.54 | FLJ14502 | TRAF4 associated factor 1 |
| NM_014176 | HSPC150 | 0.54 | HSPC150 | HSPC150 protein similar to ubiquitin- |
| | | | | conjugating enzyme |
| NM_004153 | ORC1L | 0.54 | ORC1L | origin recognition complex, subunit 1-like |
| | | | | (yeast) |
| NM_005721 | ACTR3 | 0.54 | ACTR3 | ARP3 actin-related protein 3 homolog |
| | | | | (yeast) |
| Contig55725_RC | CDCA7 | 0.54 | CDCA7 | cell division cycle associated 7 |
| NM_001274 | CHEK1 | 0.54 | CHEK1 | CHK1 checkpoint homolog (S. pombe) |
| NM_014251 | SLC25A13 | 0.54 | SLC25A13 | solute carrier family 25, member 13 |
| | | | | (citrin) |
| Contig33814_RC | | 0.54 | ASPM | asp (abnormal spindle)-like, |
| | | | | microcephaly associated (Drosophila) |
| NM_003318 | TTK | 0.53 | TTK | TTK protein kinase |
| NM_007019 | UBE2C | 0.53 | UBE2C | ubiquitin-conjugating enzyme E2C |
| D14678 | KIFC1 | 0.53 | KIFC1 | kinesin family member C1 |
| Contig28947_RC | CDC25A | 0.53 | CDC25A | cell division cycle 25A |
| M96577 | E2F1 | 0.53 | E2F1 | E2F transcription factor 1 |
| NM_003090 | SNRPA1 | 0.53 | SNRPA1 | small nuclear ribonucleoprotein |
| | | | | polypeptide A′ |
| NM_014317 | TPT | 0.53 | TPT | trans-prenyltransferase |
| D86978 | C7orf14 | 0.53 | C7orf14 | chromosome 7 open reading frame 14 |
| NM_000291 | PGK1 | 0.53 | PGK1 | phosphoglycerate kinase 1 |
| AF016495 | AQP9 | 0.53 | AQP9 | aquaporin 9 |
| AL133017 | FLJ22865 | 0.53 | FLJ22865 | hypothetical protein FLJ22865 |
| Contig45816_RC | C13orf3 | 0.52 | C13orf3 | chromosome 13 open reading frame 3 |
| AK001166 | FLJ11252 | 0.52 | XTP1 | HBxAg transactivated protein 1 |
| NM_001071 | TYMS | 0.52 | TYMS | thymidylate synthetase |
| NM_018131 | C10orf3 | 0.52 | C10orf3 | chromosome 10 open reading frame 3 |
| AF025441 | OIP5 | 0.52 | OIP5 | Opa-interacting protein 5 |
| NM_001211 | BUB1B | 0.52 | BUB1B | BUB1 budding uninhibited by |
| | | | | benzimidazoles 1 homolog beta (yeast) |
| NM_006845 | KIF2C | 0.52 | KIF2C | kinesin family member 2C |
| NM_001762 | CCT6A | 0.52 | CCT6A | chaperonin containing TCP1, subunit 6A |
| | | | | (zeta 1) |
| Contig49270_RC | KIAA1553 | 0.52 | KIAA1553 | KIAA1553 |
| NM_012412 | H2AV | 0.52 | H2AV | histone H2A.F/Z variant |
| Contig54895_RC | FLJ12691 | 0.52 | GALNT14 | UDP-N-acetyl-alpha-D- |
| | | | | galactosamine:polypeptide N- |
| | | | | acetylgalactosaminyltransferase 14 |
| | | | | (GalNAc-T14) |
| NM_004527 | MEOX1 | −0.52 | MEOX1 | mesenchyme homeo box 1 |
| AL137698 | DKFZp434C1915 | −0.53 | PGM5 | phosphoglucomutase 5 |
| Contig52543_RC | MGC29761 | −0.53 | MGC29761 | hypothetical protein MGC29761 |
| Contig37540 | | −0.53 | | Homo sapiens transcribed sequence with |
| | | | | weak similarity to protein |
| | | | | ref: NP_009056.1 (H. sapiens) |
| | | | | ubiquitously transcribed tetratricopeptide |
| | | | | repeat gene, Y chromosome; |
| | | | | Ubiquitously transcribed TPR gene on Y |
| | | | | chromosome [Homo sapiens] |
| NM_004615 | TM4SF2 | −0.53 | TM4SF2 | transmembrane 4 superfamily member 2 |
| NM_002001 | FCER1A | −0.54 | FCER1A | Fc fragment of IgE, high affinity I, |
| | | | | receptor for; alpha polypeptide |
| NM_003551 | NME5 | −0.54 | NME5 | non-metastatic cells 5, protein expressed |
| | | | | in (nucleoside-diphosphate kinase) |
| NM_003152 | STAT5A | −0.55 | STAT5A | signal transducer and activator of |
| | | | | transcription 5A |
| NM_015987 | HEBP1 | −0.55 | HEBP1 | heme binding protein 1 |
| NM_004887 | CXCL14 | −0.55 | CXCL14 | chemokine (C—X—C motif) ligand 14 |
| NM_014773 | KIAA0141 | −0.56 | KIAA0141 | KIAA0141 gene product |

TABLE 5
200 prognosis markers identified by the “Nature method” previously
described (Van't Veer et al. Nature 415(6871): 530-536 (2002)) in
sporadic, ER+ individuals.
Table 5.

| Accession/ | |
|---|---|
| Contig No. | SEQ ID NO.: |
| AB033058 | SEQ ID NO 6 |
| AB033090 | SEQ ID NO 7 |
| AB037734 | SEQ ID NO 9 |
| AB040912 | SEQ ID NO 11 |
| AF007872 | SEQ ID NO 12 |
| AF052117 | SEQ ID NO 15 |
| AF052162 | SEQ ID NO 16 |
| AF064200 | SEQ ID NO 17 |
| AF080158 | SEQ ID NO 19 |
| AF119666 | SEQ ID NO 20 |
| AF131817 | SEQ ID NO 22 |
| AK001560 | SEQ ID NO 26 |
| AK002117 | SEQ ID NO 27 |
| AL049229 | SEQ ID NO 28 |
| AL049685 | SEQ ID NO 29 |
| AL080065 | SEQ ID NO 33 |
| AL080169 | SEQ ID NO 34 |
| AL080218 | SEQ ID NO 36 |
| AL109696 | SEQ ID NO 37 |
| AL110280 | SEQ ID NO 38 |
| AL117544 | SEQ ID NO 39 |
| AL117629 | SEQ ID NO 40 |
| AL122091 | SEQ ID NO 41 |
| AL133017 | SEQ ID NO 42 |
| AL133052 | SEQ ID NO 43 |
| AL137379 | SEQ ID NO 45 |
| D00174 | SEQ ID NO 48 |
| D14678 | SEQ ID NO 49 |
| D25304 | SEQ ID NO 50 |
| D55716 | SEQ ID NO 54 |
| D86980 | SEQ ID NO 56 |
| L19778 | SEQ ID NO 57 |
| L25080 | SEQ ID NO 58 |
| NM_000014 | SEQ ID NO 61 |
| NM_000076 | SEQ ID NO 62 |
| NM_000109 | SEQ ID NO 63 |
| NM_000114 | SEQ ID NO 64 |
| NM_000150 | SEQ ID NO 66 |
| NM_000331 | SEQ ID NO 68 |
| NM_000587 | SEQ ID NO 69 |
| NM_000693 | SEQ ID NO 70 |
| NM_000820 | SEQ ID NO 72 |
| NM_000903 | SEQ ID NO 74 |
| NM_000927 | SEQ ID NO 76 |
| NM_001034 | SEQ ID NO 78 |
| NM_001232 | SEQ ID NO 82 |
| NM_001463 | SEQ ID NO 86 |
| NM_001664 | SEQ ID NO 88 |
| NM_001723 | SEQ ID NO 90 |
| NM_001765 | SEQ ID NO 92 |
| NM_001801 | SEQ ID NO 93 |
| NM_001813 | SEQ ID NO 95 |
| NM_001830 | SEQ ID NO 96 |
| NM_002001 | SEQ ID NO 97 |
| NM_002036 | SEQ ID NO 98 |
| NM_002101 | SEQ ID NO 99 |
| NM_002125 | SEQ ID NO 100 |
| NM_002142 | SEQ ID NO 101 |
| NM_002405 | SEQ ID NO 103 |
| NM_002875 | SEQ ID NO 108 |
| NM_002996 | SEQ ID NO 109 |
| NM_003005 | SEQ ID NO 110 |
| NM_003012 | SEQ ID NO 111 |
| NM_003152 | SEQ ID NO 113 |
| NM_003195 | SEQ ID NO 116 |
| NM_003364 | SEQ ID NO 119 |
| NM_003504 | SEQ ID NO 120 |
| NM_003579 | SEQ ID NO 123 |
| NM_003626 | SEQ ID NO 125 |
| NM_003722 | SEQ ID NO 127 |
| NM_003824 | SEQ ID NO 128 |
| NM_003862 | SEQ ID NO 129 |
| NM_003864 | SEQ ID NO 130 |
| NM_003956 | SEQ ID NO 131 |
| NM_003970 | SEQ ID NO 132 |
| NM_004162 | SEQ ID NO 135 |
| NM_004203 | SEQ ID NO 136 |
| NM_004217 | SEQ ID NO 138 |
| NM_004349 | SEQ ID NO 140 |
| NM_004527 | SEQ ID NO 143 |
| NM_004615 | SEQ ID NO 145 |
| NM_004701 | SEQ ID NO 148 |
| NM_004787 | SEQ ID NO 150 |
| NM_004867 | SEQ ID NO 153 |
| NM_004887 | SEQ ID NO 154 |
| NM_004944 | SEQ ID NO 155 |
| NM_004981 | SEQ ID NO 156 |
| NM_005192 | SEQ ID NO 158 |
| NM_005231 | SEQ ID NO 159 |
| NM_005269 | SEQ ID NO 160 |
| NM_005542 | SEQ ID NO 162 |
| NM_005573 | SEQ ID NO 163 |
| NM_005733 | SEQ ID NO 165 |
| NM_005792 | SEQ ID NO 166 |
| NM_006070 | SEQ ID NO 170 |
| NM_006274 | SEQ ID NO 172 |
| NM_006344 | SEQ ID NO 173 |
| NM_006441 | SEQ ID NO 174 |
| NM_006614 | SEQ ID NO 176 |
| NM_006749 | SEQ ID NO 178 |
| NM_006829 | SEQ ID NO 180 |
| NM_006983 | SEQ ID NO 182 |
| NM_007210 | SEQ ID NO 185 |
| NM_007370 | SEQ ID NO 186 |
| NM_012111 | SEQ ID NO 188 |
| NM_012291 | SEQ ID NO 189 |
| NM_012450 | SEQ ID NO 193 |
| NM_012453 | SEQ ID NO 194 |
| NM_012464 | SEQ ID NO 195 |
| NM_013261 | SEQ ID NO 197 |
| NM_013272 | SEQ ID NO 198 |
| NM_013277 | SEQ ID NO 199 |
| NM_013981 | SEQ ID NO 200 |
| NM_013999 | SEQ ID NO 201 |
| NM_014015 | SEQ ID NO 202 |
| NM_014067 | SEQ ID NO 203 |
| NM_014258 | SEQ ID NO 206 |
| NM_014737 | SEQ ID NO 211 |
| NM_014791 | SEQ ID NO 213 |
| NM_014926 | SEQ ID NO 214 |
| NM_015544 | SEQ ID NO 215 |
| NM_016049 | SEQ ID NO 220 |
| NM_016250 | SEQ ID NO 222 |
| NM_016442 | SEQ ID NO 224 |
| NM_016815 | SEQ ID NO 226 |
| NM_017647 | SEQ ID NO 228 |
| NM_017681 | SEQ ID NO 229 |
| NM_017888 | SEQ ID NO 232 |
| NM_017899 | SEQ ID NO 233 |
| NM_018014 | SEQ ID NO 235 |
| NM_018154 | SEQ ID NO 239 |
| NM_018286 | SEQ ID NO 240 |
| NM_018335 | SEQ ID NO 241 |
| NM_018390 | SEQ ID NO 242 |
| NM_018659 | SEQ ID NO 247 |
| NM_019013 | SEQ ID NO 249 |
| NM_021052 | SEQ ID NO 254 |
| NM_021064 | SEQ ID NO 255 |
| NM_021183 | SEQ ID NO 257 |
| U56387 | SEQ ID NO 261 |
| V00522 | SEQ ID NO 265 |
| X74794 | SEQ ID NO 266 |
| AA598803_RC | SEQ ID NO 268 |
| AW190932_RC | SEQ ID NO 270 |
| NM_018692 | SEQ ID NO 273 |
| Contig2313_RC | SEQ ID NO 276 |
| Contig8113_RC | SEQ ID NO 279 |
| Contig8373_RC | SEQ ID NO 280 |
| Contig37540 | SEQ ID NO 286 |
| Contig49875 | SEQ ID NO 288 |
| Contig50368 | SEQ ID NO 289 |
| Contig10007_RC | SEQ ID NO 292 |
| Contig18296_RC | SEQ ID NO 296 |
| Contig18543_RC | SEQ ID NO 298 |
| Contig20512_RC | SEQ ID NO 299 |
| Contig21986_RC | SEQ ID NO 300 |
| Contig22337_RC | SEQ ID NO 301 |
| Contig23475_RC | SEQ ID NO 302 |
| Contig25938_RC | SEQ ID NO 304 |
| Contig26022_RC | SEQ ID NO 305 |
| Contig26059_RC | SEQ ID NO 306 |
| Contig26492_RC | SEQ ID NO 307 |
| Contig27623_RC | SEQ ID NO 308 |
| Contig30993_RC | SEQ ID NO 312 |
| Contig31361_RC | SEQ ID NO 313 |
| Contig32604_RC | SEQ ID NO 316 |
| Contig34430_RC | SEQ ID NO 320 |
| Contig36243_RC | SEQ ID NO 324 |
| Contig37198_RC | SEQ ID NO 325 |
| Contig38463_RC | SEQ ID NO 327 |
| Contig40552_RC | SEQ ID NO 332 |
| Contig41413_RC | SEQ ID NO 333 |
| Contig41990_RC | SEQ ID NO 334 |
| Contig42036_RC | SEQ ID NO 335 |
| Contig42103_RC | SEQ ID NO 336 |
| Contig43289_RC | SEQ ID NO 337 |
| Contig43648_RC | SEQ ID NO 338 |
| Contig43927_RC | SEQ ID NO 342 |
| Contig45441_RC | SEQ ID NO 345 |
| Contig46351_RC | SEQ ID NO 349 |
| Contig46756_RC | SEQ ID NO 350 |
| Contig47308_RC | SEQ ID NO 352 |
| Contig48353_RC | SEQ ID NO 355 |
| Contig49279_RC | SEQ ID NO 357 |
| Contig49773_RC | SEQ ID NO 358 |
| Contig50470_RC | SEQ ID NO 360 |
| Contig50661_RC | SEQ ID NO 361 |
| Contig51456_RC | SEQ ID NO 364 |
| Contig51710_RC | SEQ ID NO 365 |
| Contig52193_RC | SEQ ID NO 366 |
| Contig54895_RC | SEQ ID NO 372 |
| Contig54926_RC | SEQ ID NO 373 |
| Contig54956_RC | SEQ ID NO 374 |
| Contig54993_RC | SEQ ID NO 375 |
| Contig55725_RC | SEQ ID NO 376 |
| Contig56843_RC | SEQ ID NO 380 |
| Contig57803_RC | SEQ ID NO 383 |
| Contig58260_RC | SEQ ID NO 384 |
| Contig59294_RC | SEQ ID NO 385 |
| Contig59870_RC | SEQ ID NO 386 |

TABLE 6
Accession/contig number, gene name, correlation to prognosis, and description for
each of the markers listed in Table 5.
Table 6.

| Accession/ | | | | |
|---|---|---|---|---|
| Contig No. | Gene | Corr | Name | Description |
| AL133017 | FLJ22865 | 0.43 | FLJ22865 | hypothetical protein FLJ22865 |
| AF119666 | LOC55971 | 0.4 | LOC55971 | Homo sapiens insulin receptor tyrosine |
| | | | | kinase substrate mRNA, complete cds. |
| Contig54895_RC | FLJ12691 | 0.38 | GALNT14 | UDP-N-acetyl-alpha-D- |
| | | | | galactosamine:polypeptide N- |
| | | | | acetylgalactosaminyltransferase 14 |
| | | | | (GalNAc-T14) |
| NM_018154 | ASF1B | 0.37 | ASF1B | ASF1 anti-silencing function 1 homolog B |
| | | | | (S. cerevisiae) |
| Contig18543_RC | | 0.37 | | Homo sapiens mRNA; cDNA |
| | | | | DKFZp686F1782 (from clone |
| | | | | DKFZp686F1782) |
| NM_003195 | TCEA2 | 0.37 | TCEA2 | transcription elongation factor A (SII), 2 |
| NM_005573 | LMNB1 | 0.36 | LMNB1 | lamin B1 |
| AA598803_RC | | 0.36 | LOC139886 | hypothetical protein LOC139886 |
| AL049685 | RAP2C | 0.36 | RAP2C | RAP2C, member of RAS oncogene |
| | | | | family |
| L19778 | HIST1H2AG | 0.36 | HIST1H2AG | histone 1, H2ag |
| NM_003626 | PPFIA1 | 0.36 | PPFIA1 | protein tyrosine phosphatase, receptor |
| | | | | type, f polypeptide (PTPRF), interacting |
| | | | | protein (liprin), alpha 1 |
| NM_018335 | C14orf131 | 0.36 | C14orf131 | chromosome 14 open reading frame 131 |
| NM_004217 | STK12 | 0.35 | AURKB | aurora kinase B |
| NM_013277 | RACGAP1 | 0.35 | RACGAP1 | Rac GTPase activating protein 1 |
| NM_021183 | RAP2C | 0.35 | RAP2C | RAP2C, member of RAS oncogene |
| | | | | family |
| AF052162 | FLJ12443 | 0.35 | FLJ12443 | hypothetical protein FLJ12443 |
| NM_000903 | NQO1 | 0.35 | NQO1 | NAD(P)H dehydrogenase, quinone 1 |
| NM_001034 | RRM2 | 0.34 | RRM2 | ribonucleotide reductase M2 polypeptide |
| NM_021064 | HIST1H2AG | 0.34 | HIST1H2AG | histone 1, H2ag |
| AL137379 | FLJ13912 | 0.34 | FLJ13912 | hypothetical protein FLJ13912 |
| NM_014258 | SYCP2 | 0.34 | SYCP2 | synaptonemal complex protein 2 |
| AF007872 | TOR1B | 0.34 | TOR1B | torsin family 1, member B (torsin B) |
| NM_001664 | ARHA | 0.34 | ARHA | ras homolog gene family, member A |
| AF064200 | UGT2B4 | 0.34 | UGT2B4 | UDP glycosyltransferase 2 family, |
| | | | | polypeptide B4 |
| Contig36243_RC | | 0.34 | DKFZP434A1022 | hypothetical protein DKFZp434A1022 |
| D55716 | MCM7 | 0.33 | MCM7 | MCM7 minichromosome maintenance |
| | | | | deficient 7 (S. cerevisiae) |
| Contig22337_RC | OXR1 | 0.33 | OXR1 | oxidation resistance 1 |
| NM_001813 | CENPE | 0.33 | CENPE | centromere protein E, 312 kDa |
| NM_012111 | AHSA1 | 0.33 | AHSA1 | AHA1, activator of heat shock 90 kDa |
| | | | | protein ATPase homolog 1 (yeast) |
| AL049229 | | 0.33 | | Homo sapiens mRNA; cDNA |
| | | | | DKFZp564O1016 (from clone |
| | | | | DKFZp564O1016) |
| AK002117 | | 0.33 | GNA13 | guanine nucleotide binding protein (G |
| | | | | protein), alpha 13 |
| Contig31361_RC | | 0.33 | DOCK7 | dedicator of cytokinesis 7 |
| Contig40552_RC | FLJ25348 | 0.33 | FLJ25348 | hypothetical protein FLJ25348 |
| NM_003364 | UP | 0.33 | UPP1 | uridine phosphorylase 1 |
| NM_012450 | SLC13A4 | 0.33 | SLC13A4 | solute carrier family 13 (sodium/sulfate |
| | | | | symporters), member 4 |
| NM_014067 | LRP16 | 0.33 | LRP16 | LRP16 protein |
| NM_002875 | RAD51 | 0.32 | RAD51 | RAD51 homolog (RecA homolog, E. coli) |
| | | | | (S. cerevisiae) |
| D14678 | KIFC1 | 0.32 | KIFC1 | kinesin family member C1 |
| NM_005733 | KIF20A | 0.32 | KIF20A | kinesin family member 20A |
| NM_005231 | EMS1 | 0.32 | EMS1 | ems1 sequence (mammary tumor and |
| | | | | squamous cell carcinoma-associated |
| | | | | (p80/85 src substrate) |
| NM_003864 | SAP30 | 0.32 | SAP30 | sin3-associated polypeptide, 30 kDa |
| AW190932_RC | GPI | 0.32 | GPI | xl66g09.x1 NCI_CGAP_Pan1 Homo |
| | | | | sapiens cDNA clone IMAGE: 2679712 3′, |
| | | | | mRNA sequence. |
| Contig23475_RC | | 0.32 | FLJ23471 | MICAL-like 2 |
| L25080 | ARHA | 0.32 | ARHA | ras homolog gene family, member A |
| NM_007210 | GALNT6 | 0.32 | GALNT6 | UDP-N-acetyl-alpha-D- |
| | | | | galactosamine:polypeptide N- |
| | | | | acetylgalactosaminyltransferase 6 |
| | | | | (GalNAc-T6) |
| D86980 | KIAA0227 | 0.32 | TTC9 | tetratricopeptide repeat domain 9 |
| NM_003579 | RAD54L | 0.31 | RAD54L | RAD54-like (S. cerevisiae) |
| Contig41413_RC | RRM2 | 0.31 | RRM2 | ribonucleotide reductase M2 polypeptide |
| Contig48353_RC | FKSG14 | 0.31 | FKSG14 | leucine zipper protein FKSG14 |
| NM_004162 | RAB5A | 0.31 | RAB5A | RAB5A, member RAS oncogene family |
| NM_006070 | TFG | 0.31 | TFG | TRK-fused gene |
| Contig34430_RC | FLJ10656 | 0.31 | P15RS | hypothetical protein FLJ10656 |
| AB033058 | DLG3 | 0.31 | DLG3 | discs, large homolog 3 (neuroendocrine- |
| | | | | dlg, Drosophila) |
| NM_016442 | ARTS-1 | 0.31 | ARTS-1 | type 1 tumor necrosis factor receptor |
| | | | | shedding aminopeptidase regulator |
| Contig51456_RC | LOC93109 | 0.31 | LOC93109 | hypothetical protein BC007772 |
| NM_005542 | INSIG1 | 0.31 | INSIG1 | insulin induced gene 1 |
| AL133052 | C1orf37 | 0.31 | C1orf37 | chromosome 1 open reading frame 37 |
| Contig54926_RC | SFTPC | 0.31 | SFTPC | Homo sapiens cDNA FLJ42627 fis, clone |
| | | | | BRACE3018308 |
| NM_021052 | HIST1H2AE | 0.31 | HIST1H2AE | histone 1, H2ae |
| NM_003504 | CDC45L | 0.3 | CDC45L | CDC45 cell division cycle 45-like (S. cerevisiae) |
| Contig56843_RC | CCNB1 | 0.3 | CCNB1 | cyclin B1 |
| NM_019013 | FLJ10156 | 0.3 | FLJ10156 | hypothetical protein FLJ10156 |
| NM_012291 | ESPL1 | 0.3 | ESPL1 | extra spindle poles like 1 (S. cerevisiae) |
| NM_007370 | RFC5 | 0.3 | RFC5 | replication factor C (activator 1) 5, |
| | | | | 36.5 kDa |
| NM_014791 | MELK | 0.3 | MELK | maternal embryonic leucine zipper kinase |
| NM_005192 | CDKN3 | 0.3 | CDKN3 | cyclin-dependent kinase inhibitor 3 |
| | | | | (CDK2-associated dual specificity |
| | | | | phosphatase) |
| X74794 | MCM4 | 0.3 | MCM4 | MCM4 minichromosome maintenance |
| | | | | deficient 4 (S. cerevisiae) |
| NM_018390 | FLJ11323 | 0.3 | FLJ11323 | hypothetical protein FLJ11323 |
| NM_004203 | RBL2 | 0.3 | PKMYT1 | membrane-associated tyrosine- and |
| | | | | threonine-specific cdc2-inhibitory kinase |
| NM_016049 | LOC51016 | 0.3 | C14orf122 | chromosome 14 open reading frame 122 |
| NM_012453 | TBL2 | 0.3 | TBL2 | transducin (beta)-like 2 |
| NM_000150 | FUT6 | 0.3 | FUT6 | fucosyltransferase 6 (alpha (1,3) |
| | | | | fucosyltransferase) |
| Contig18296_RC | | 0.3 | | Homo sapiens transcribed sequences |
| NM_006441 | MTHFS | 0.3 | MTHFS | 5,10-methenyltetrahydrofolate synthetase |
| | | | | (5-formyltetrahydrofolate cyclo-ligase) |
| Contig21986_RC | | 0.3 | | Homo sapiens transcribed sequence with |
| | | | | moderate similarity to protein |
| | | | | ref: NP_112198.1 (H. sapiens) ring finger |
| | | | | protein 32 [Homo sapiens] |
| NM_004981 | KCNJ4 | 0.3 | KCNJ4 | potassium inwardly-rectifying channel, |
| | | | | subfamily J, member 4 |
| NM_003824 | FADD | 0.3 | FADD | Fas (TNFRSF6)-associated via death |
| | | | | domain |
| AF080158 | IKBKB | 0.3 | IKBKB | inhibitor of kappa light polypeptide gene |
| | | | | enhancer in B-cells, kinase beta |
| NM_017681 | FLJ20130 | 0.3 | FLJ20130 | hypothetical protein FLJ20130 |
| NM_004701 | CCNB2 | 0.29 | CCNB2 | cyclin B2 |
| Contig55725_RC | CDCA7 | 0.29 | CDCA7 | cell division cycle associated 7 |
| NM_005792 | MPHOSPH6 | 0.29 | MPHOSPH6 | M-phase phosphoprotein 6 |
| NM_017647 | FTSJ3 | 0.29 | FTSJ3 | FtsJ homolog 3 (E. coli) |
| AL122091 | LOC56965 | 0.29 | LOC56965 | hypothetical protein from EUROIMAGE |
| | | | | 1977056 |
| AL117629 | DKFZP434C245 | 0.29 | DKFZP434C245 | DKFZP434C245 protein |
| Contig26059_RC | | 0.29 | | Homo sapiens transcribed sequences |
| Contig43927_RC | | 0.29 | | Homo sapiens transcribed sequences |
| NM_006749 | SLC20A2 | 0.29 | SLC20A2 | solute carrier family 20 (phosphate |
| | | | | transporter), member 2 |
| Contig51710_RC | | −0.29 | | Homo sapiens clone DNA100312 |
| | | | | VSSW1971 (UNQ1971) mRNA, complete |
| | | | | cds |
| NM_018014 | BCL11A | −0.29 | BCL11A | B-cell CLL/lymphoma 11A (zinc finger |
| | | | | protein) |
| Contig26492_RC | C12orf6 | −0.29 | C12orf6 | chromosome 12 open reading frame 6 |
| Contig32604_RC | | −0.29 | FLJ11753 | hypothetical protein FLJ11753 |
| NM_001801 | CDO1 | −0.29 | CDO1 | cysteine dioxygenase, type I |
| NM_006614 | CHL1 | −0.29 | CHL1 | cell adhesion molecule with homology to |
| | | | | L1CAM (close homolog of L1) |
| Contig45441_RC | | −0.29 | LOC284542 | hypothetical protein LOC284542 |
| D25304 | ARHGEF6 | −0.29 | ARHGEF6 | Rac/Cdc42 guanine nucleotide exchange |
| | | | | factor (GEF) 6 |
| NM_006983 | MMP23B | −0.29 | MMP23B | matrix metalloproteinase 23B |
| Contig38463_RC | LOC64150 | −0.29 | C14orf134 | deiodinase, iodothyronine, type III |
| | | | | opposite strand |
| NM_003005 | SELP | −0.29 | SELP | selectin P (granule membrane protein |
| | | | | 140 kDa, antigen CD62) |
| NM_014926 | KIAA0848 | −0.29 | KIAA0848 | KIAA0848 protein |
| AL080169 | DKFZP434C171 | −0.3 | DKFZP434C171 | DKFZP434C171 protein |
| Contig43289_RC | | −0.3 | LOC170371 | hypothetical protein LOC170371 |
| AK001560 | NECL1 | −0.3 | NECL1 | nectin-like protein 1 |
| NM_006274 | CCL19 | −0.3 | CCL19 | chemokine (C-C motif) ligand 19 |
| NM_006344 | HML2 | −0.3 | CLECSF13 | C-type (calcium dependent, |
| | | | | carbohydrate-recognition domain) lectin, |
| | | | | superfamily member 13 (macrophage- |
| | | | | derived) |
| D00174 | SERPINF2 | −0.3 | SERPINF2 | serine (or cysteine) proteinase inhibitor, |
| | | | | clade F (alpha-2 antiplasmin, pigment |
| | | | | epithelium derived factor), member 2 |
| Contig10007_RC | | −0.3 | | Homo sapiens similar to MHC HLA-SX- |
| | | | | alpha (LOC377373), mRNA |
| Contig43648_RC | | −0.3 | | Homo sapiens transcribed sequences |
| Contig54956_RC | FLJ23119 | −0.3 | FLJ23119 | hypothetical protein FLJ23119 |
| NM_000076 | CDKN1C | −0.3 | CDKN1C | cyclin-dependent kinase inhibitor 1C |
| | | | | (p57, Kip2) |
| NM_000927 | ABCB1 | −0.3 | ABCB1 | ATP-binding cassette, sub-family B |
| | | | | (MDR/TAP), member 1 |
| Contig41990_RC | DKFZP434D0127 | −0.3 | USP44 | ubiquitin specific protease 44 |
| NM_001723 | BPAG1 | −0.3 | BPAG1 | bullous pemphigoid antigen 1, |
| | | | | 230/240 kDa |
| Contig50661_RC | FLJ14440 | −0.3 | THSD2 | thrombospondin, type I, domain 2 |
| AF052117 | | −0.3 | CLCN4 | chloride channel 4 |
| Contig8373_RC | | −0.3 | | Homo sapiens transcribed sequence with |
| | | | | weak similarity to protein |
| | | | | ref: NP_060312.1 (H. sapiens) |
| | | | | hypothetical protein FLJ20489 |
| | | | | [Homo sapiens] |
| AL109696 | | −0.3 | | Homo sapiens mRNA full length insert |
| | | | | cDNA clone EUROIMAGE 21920 |
| Contig25938_RC | | −0.3 | EBF2 | early B-cell factor 2 |
| AB040912 | SEMA6D | −0.3 | SEMA6D | sema domain, transmembrane domain |
| | | | | (TM), and cytoplasmic domain, |
| | | | | (semaphorin) 6D |
| Contig57803_RC | CHD1L | −0.3 | CHD1L | chromodomain helicase DNA binding |
| | | | | protein 1-like |
| AB037734 | PCDH19 | −0.3 | PCDH19 | protocadherin 19 |
| NM_004787 | SLIT2 | −0.3 | SLIT2 | slit homolog 2 (Drosophila) |
| NM_001232 | CASQ2 | −0.3 | CASQ2 | calsequestrin 2 (cardiac muscle) |
| Contig2313_RC | | −0.3 | DKFZp667B0210 | hypothetical protein DKFZp667B0210 |
| AL080218 | | −0.3 | STAT5B | signal transducer and activator of |
| | | | | transcription 5B |
| AL080065 | DKFZP564J102 | −0.3 | DKFZP564J102 | DKFZP564J102 protein |
| NM_002142 | HOXA9 | −0.3 | HOXA9 | homeo box A9 |
| Contig59294_RC | EPC1 | −0.3 | EPC1 | enhancer of polycomb homolog 1, |
| | | | | (Drosophila) |
| AL117544 | DKFZP434I092 | −0.3 | DKFZP434I092 | DKFZP434I092 protein |
| NM_002101 | GYPC | −0.31 | GYPC | glycophorin C (Gerbich blood group) |
| NM_002405 | MFNG | −0.31 | MFNG | manic fringe homolog (Drosophila) |
| Contig52193_RC | | −0.31 | ABCB1 | ATP-binding cassette, sub-family B |
| | | | | (MDR/TAP), member 1 |
| Contig58260_RC | DGAT2 | −0.31 | DGAT2 | diacylglycerol O-acyltransferase homolog |
| | | | | 2 (mouse) |
| Contig49773_RC | CYYR1 | −0.31 | CYYR1 | cysteine and tyrosine-rich 1 |
| Contig54993_RC | CLDN11 | −0.31 | CLDN11 | claudin 11 (oligodendrocyte |
| | | | | transmembrane protein) |
| AB033090 | PAK7 | −0.31 | PAK7 | p21(CDKN1A)-activated kinase 7 |
| NM_003722 | TP73L | −0.31 | TP73L | tumor protein p73-like |
| NM_002996 | CX3CL1 | −0.31 | CX3CL1 | chemokine (C—X3—C motif) ligand 1 |
| Contig30993_RC | BACH2 | −0.31 | BACH2 | BTB and CNC homology 1, basic leucine |
| | | | | zipper transcription factor 2 |
| NM_000693 | ALDH1A3 | −0.31 | ALDH1A3 | aldehyde dehydrogenase 1 family, |
| | | | | member A3 |
| NM_014737 | RASSF2 | −0.31 | RASSF2 | Ras association (RaIGDS/AF-6) domain |
| | | | | family 2 |
| Contig46351_RC | | −0.31 | | Homo sapiens transcribed sequence with |
| | | | | weak similarity to protein pir: JC1405 |
| | | | | (H. sapiens) JC1405 6- |
| | | | | pyruvoyltetrahydropterin synthase- |
| | | | | human |
| Contig8113_RC | | −0.31 | | Homo sapiens transcribed sequences |
| NM_002125 | HLA-DRB5 | −0.31 | HLA-DRB5 | major histocompatibility complex, class II, |
| | | | | DR beta 3 |
| Contig37198_RC | HSPA12B | −0.31 | HSPA12B | heat shock 70 kD protein 12B |
| AF131817 | | −0.31 | CBFA2T1 | core-binding factor, runt domain, alpha |
| | | | | subunit 2; translocated to, 1; cyclin D- |
| | | | | related |
| NM_018659 | C17 | −0.31 | C17 | cytokine-like protein C17 |
| Contig20512_RC | | −0.31 | LOC285671 | hypothetical protein LOC285671 |
| NM_014015 | MYLE | −0.31 | DEXI | dexamethasone-induced transcript |
| NM_001765 | CD1C | −0.32 | CD1C | CD1C antigen, c polypeptide |
| NM_018692 | C20orf17 | −0.32 | C20orf17 | chromosome 20 open reading frame 17 |
| Contig49875 | | −0.32 | | Homo sapiens full length insert cDNA |
| | | | | YN61C04 |
| Contig59870_RC | IRX1 | −0.32 | IRX1 | iroquois homeobox protein 1 |
| Contig42036_RC | BACH2 | −0.32 | BACH2 | BTB and CNC homology 1, basic leucine |
| | | | | zipper transcription factor 2 |
| Contig46756_RC | SYN2 | −0.32 | SYN2 | synapsin II |
| Contig50470_RC | KIAA1921 | −0.32 | KIAA1921 | KIAA1921 protein |
| NM_013272 | SLC21A11 | −0.32 | SLC21A11 | solute carrier organic anion transporter |
| | | | | family, member 3A1 |
| NM_000820 | GAS6 | −0.32 | GAS6 | growth arrest-specific 6 |
| Contig27623_RC | | −0.32 | | Homo sapiens transcribed sequences |
| NM_016250 | NDRG2 | −0.32 | NDRG2 | NDRG family member 2 |
| NM_006829 | APM2 | −0.32 | APM2 | adipose specific 2 |
| NM_015544 | DKFZP564K1964 | −0.32 | DKFZP564K1964 | DKFZP564K1964 protein |
| NM_016815 | GYPC | −0.33 | GYPC | glycophorin C (Gerbich blood group) |
| NM_000014 | A2M | −0.33 | A2M | alpha-2-macroglobulin |
| NM_004887 | CXCL14 | −0.33 | CXCL14 | chemokine (C—X—C motif) ligand 14 |
| U56387 | PCSK5 | −0.33 | PCSK5 | proprotein convertase subtilisin/kexin |
| | | | | type 5 |
| NM_018286 | FLJ10970 | −0.34 | FLJ10970 | hypothetical protein FLJ10970 |
| NM_002001 | FCER1A | −0.34 | FCER1A | Fc fragment of IgE, high affinity I, |
| | | | | receptor for; alpha polypeptide |
| NM_003012 | SFRP1 | −0.34 | SFRP1 | secreted frizzled-related protein 1 |
| NM_000114 | EDN3 | −0.34 | EDN3 | endothelin 3 |
| NM_000331 | SAA1 | −0.34 | SAA1 | serum amyloid A1 |
| NM_003862 | FGF18 | −0.34 | FGF18 | fibroblast growth factor 18 |
| NM_004349 | CBFA2T1 | −0.34 | CBFA2T1 | core-binding factor, runt domain, alpha |
| | | | | subunit 2; translocated to, 1; cyclin D- |
| | | | | related |
| NM_005269 | GLI | −0.34 | GLI | glioma-associated oncogene homolog |
| | | | | (zinc finger protein) |
| Contig50368 | | −0.34 | | cDNA encoding novel polypeptide from |
| | | | | human umbilical vein endothelial cell. |
| NM_017888 | FLJ20581 | −0.34 | FLJ20581 | hypothetical protein FLJ20581 |
| Contig42103_RC | | −0.35 | C20orf17 | chromosome 20 open reading frame 17 |
| Contig49279_RC | | −0.35 | FLJ25461 | hypothetical protein FLJ25461 |
| NM_001830 | CLCN4 | −0.35 | CLCN4 | chloride channel 4 |
| NM_001463 | FRZB | −0.35 | FRZB | frizzled-related protein |
| NM_003970 | MYOM2 | −0.35 | MYOM2 | myomesin (M-protein) 2, 165 kDa |
| V00522 | HLA-DRB3 | −0.35 | HLA-DRB3 | major histocompatibility complex, class II, |
| | | | | DR beta 3 |
| NM_013999 | MEOX1 | −0.36 | MEOX1 | mesenchyme homeo box 1 |
| NM_000587 | C7 | −0.36 | C7 | complement component 7 |
| AL110280 | | −0.36 | PAPLN | papilin, proteoglycan-like sulfated |
| | | | | glycoprotein |
| NM_000109 | DMD | −0.36 | DMD | dystrophin (muscular dystrophy, |
| | | | | Duchenne and Becker types) |
| Contig26022_RC | MGC13057 | −0.36 | MGC13057 | hypothetical protein MGC13057 |
| NM_013981 | NRG2 | −0.36 | NRG2 | neuregulin 2 |
| NM_013261 | PPARGC1 | −0.36 | PPARGC1 | peroxisome proliferative activated |
| | | | | receptor, gamma, coactivator 1 |
| Contig37540 | | −0.37 | | Homo sapiens transcribed sequence with |
| | | | | weak similarity to protein |
| | | | | ref: NP_009056.1 (H. sapiens) |
| | | | | ubiquitously transcribed tetratricopeptide |
| | | | | repeat gene, Y chromosome; |
| | | | | Ubiquitously transcribed TPR gene on Y |
| | | | | chromosome [Homo sapiens] |
| NM_017899 | TSC | −0.37 | TSC | hypothetical protein FLJ20607 |
| NM_003152 | STAT5A | −0.37 | STAT5A | signal transducer and activator of |
| | | | | transcription 5A |
| NM_002036 | FY | −0.38 | FY | Duffy blood group |
| NM_004867 | ITM2A | −0.38 | ITM2A | integral membrane protein 2A |
| Contig47308_RC | | −0.38 | | Homo sapiens hypothetical gene |
| | | | | supported by NM_018692 (LOC374296), |
| | | | | mRNA |
| NM_004527 | MEOX1 | −0.39 | MEOX1 | mesenchyme homeo box 1 |
| NM_004615 | TM4SF2 | −0.4 | TM4SF2 | transmembrane 4 superfamily member 2 |
| NM_003956 | CH25H | −0.4 | CH25H | cholesterol 25-hydroxylase |
| NM_012464 | TLL1 | −0.4 | TLL1 | tolloid-like 1 |
| NM_004944 | DNASE1L3 | −0.41 | DNASE1L3 | deoxyribonuclease I-like 3 |

TABLE 7
100 prognosis markers identified by an iterative
method in sporadic, ER+ individuals.
Table 7.

| Accession/ | |
|---|---|
| Contig No. | SEQ ID NO.: |
| AB024704 | SEQ ID NO 2 |
| AF052162 | SEQ ID NO 16 |
| AF119666 | SEQ ID NO 20 |
| AF131817 | SEQ ID NO 22 |
| AK001166 | SEQ ID NO 25 |
| AK001560 | SEQ ID NO 26 |
| AK002117 | SEQ ID NO 27 |
| AL049685 | SEQ ID NO 29 |
| AL049949 | SEQ ID NO 30 |
| AL080169 | SEQ ID NO 34 |
| AL110280 | SEQ ID NO 38 |
| AL133017 | SEQ ID NO 42 |
| AL137698 | SEQ ID NO 47 |
| D00174 | SEQ ID NO 48 |
| D55716 | SEQ ID NO 54 |
| NM_000076 | SEQ ID NO 62 |
| NM_000109 | SEQ ID NO 63 |
| NM_000114 | SEQ ID NO 64 |
| NM_000331 | SEQ ID NO 68 |
| NM_000587 | SEQ ID NO 69 |
| NM_000820 | SEQ ID NO 72 |
| NM_000927 | SEQ ID NO 76 |
| NM_001034 | SEQ ID NO 78 |
| NM_001071 | SEQ ID NO 79 |
| NM_001237 | SEQ ID NO 83 |
| NM_001463 | SEQ ID NO 86 |
| NM_002001 | SEQ ID NO 97 |
| NM_002036 | SEQ ID NO 98 |
| NM_002101 | SEQ ID NO 99 |
| NM_002358 | SEQ ID NO 102 |
| NM_002405 | SEQ ID NO 103 |
| NM_002875 | SEQ ID NO 108 |
| NM_002996 | SEQ ID NO 109 |
| NM_003012 | SEQ ID NO 111 |
| NM_003152 | SEQ ID NO 113 |
| NM_003504 | SEQ ID NO 120 |
| NM_003600 | SEQ ID NO 124 |
| NM_003626 | SEQ ID NO 125 |
| NM_003686 | SEQ ID NO 126 |
| NM_003862 | SEQ ID NO 129 |
| NM_003956 | SEQ ID NO 131 |
| NM_003970 | SEQ ID NO 132 |
| NM_003981 | SEQ ID NO 133 |
| NM_004162 | SEQ ID NO 135 |
| NM_004217 | SEQ ID NO 138 |
| NM_004349 | SEQ ID NO 140 |
| NM_004526 | SEQ ID NO 142 |
| NM_004527 | SEQ ID NO 143 |
| NM_004615 | SEQ ID NO 145 |
| NM_004701 | SEQ ID NO 148 |
| NM_004787 | SEQ ID NO 150 |
| NM_004867 | SEQ ID NO 153 |
| NM_004887 | SEQ ID NO 154 |
| NM_004944 | SEQ ID NO 155 |
| NM_005192 | SEQ ID NO 158 |
| NM_005269 | SEQ ID NO 160 |
| NM_005542 | SEQ ID NO 162 |
| NM_005573 | SEQ ID NO 163 |
| NM_005733 | SEQ ID NO 165 |
| NM_006027 | SEQ ID NO 169 |
| NM_012310 | SEQ ID NO 190 |
| NM_012464 | SEQ ID NO 195 |
| NM_013261 | SEQ ID NO 197 |
| NM_013277 | SEQ ID NO 199 |
| NM_013981 | SEQ ID NO 200 |
| NM_013999 | SEQ ID NO 201 |
| NM_014176 | SEQ ID NO 204 |
| NM_014791 | SEQ ID NO 213 |
| NM_016049 | SEQ ID NO 220 |
| NM_016250 | SEQ ID NO 222 |
| NM_016602 | SEQ ID NO 225 |
| NM_016815 | SEQ ID NO 226 |
| NM_018154 | SEQ ID NO 239 |
| NM_018286 | SEQ ID NO 240 |
| NM_018492 | SEQ ID NO 244 |
| NM_020675 | SEQ ID NO 251 |
| U96131 | SEQ ID NO 264 |
| NM_003158 | SEQ ID NO 269 |
| Contig34952 | SEQ ID NO 284 |
| Contig37540 | SEQ ID NO 286 |
| Contig26022_RC | SEQ ID NO 305 |
| Contig27623_RC | SEQ ID NO 308 |
| Contig31646_RC | SEQ ID NO 314 |
| Contig33814_RC | SEQ ID NO 317 |
| Contig37198_RC | SEQ ID NO 325 |
| Contig38901_RC | SEQ ID NO 328 |
| Contig41413_RC | SEQ ID NO 333 |
| Contig42036_RC | SEQ ID NO 335 |
| Contig42103_RC | SEQ ID NO 336 |
| Contig43289_RC | SEQ ID NO 337 |
| Contig43759_RC | SEQ ID NO 340 |
| Contig45821_RC | SEQ ID NO 348 |
| Contig46756_RC | SEQ ID NO 350 |
| Contig46796_RC | SEQ ID NO 351 |
| Contig47308_RC | SEQ ID NO 352 |
| Contig49279_RC | SEQ ID NO 357 |
| Contig49869_RC | SEQ ID NO 359 |
| Contig52419_RC | SEQ ID NO 367 |
| Contig54993_RC | SEQ ID NO 375 |
| Contig59870_RC | SEQ ID NO 386 |

TABLE 8
Accession/contig number, gene name, correlation to prognosis, and description for
each of the markers listed in Table 1.
Table 8.

| Accession/ | | | | |
|---|---|---|---|---|
| Contig No. | Gene | Corr. | Name | Description |
| NM_013277 | RACGAP1 | 0.61 | RACGAP1 | Rac GTPase activating protein 1 |
| NM_003504 | CDC45L | 0.59 | CDC45L | CDC45 cell division cycle 45-like (S. cerevisiae) |
| NM_005573 | LMNB1 | 0.59 | LMNB1 | lamin B1 |
| NM_002358 | MAD2L1 | 0.58 | MAD2L1 | MAD2 mitotic arrest deficient-like 1 (yeast) |
| NM_018492 | TOPK | 0.58 | TOPK | T-LAK cell-originated protein kinase |
| AL133017 | FLJ22865 | 0.58 | FLJ22865 | hypothetical protein FLJ22865 |
| AK001166 | FLJ11252 | 0.57 | XTP1 | HBxAg transactivated protein 1 |
| NM_002875 | RAD51 | 0.56 | RAD51 | RAD51 homolog (RecA homolog, E. coli) (S. cerevisiae) |
| AF119666 | LOC55971 | 0.56 | LOC55971 | Homo sapiens insulin receptor tyrosine |
| | | | | kinase substrate mRNA, complete cds. |
| NM_003158 | STK6 | 0.55 | STK6 | Homo sapiens mRNA for aurora/IPL1- |
| | | | | related kinase, complete cds. |
| NM_012310 | KIF4A | 0.55 | KIF4A | kinesin family member 4A |
| NM_001034 | RRM2 | 0.55 | RRM2 | ribonucleotide reductase M2 polypeptide |
| NM_014176 | HSPC150 | 0.55 | HSPC150 | HSPC150 protein similar to ubiquitin- |
| | | | | conjugating enzyme |
| AK002117 | | 0.55 | GNA13 | |
| NM_020675 | AD024 | 0.54 | AD024 | |
| Contig41413_RC | RRM2 | 0.54 | RRM2 | ribonucleotide reductase M2 polypeptide |
| NM_003686 | EXO1 | 0.54 | EXO1 | exonuclease 1 |
| D55716 | MCM7 | 0.54 | MCM7 | MCM7 minichromosome maintenance |
| | | | | deficient 7 (S. cerevisiae) |
| AB024704 | C20orf1 | 0.53 | C20orf1 | TPX2, microtubule-associated protein |
| | | | | homolog (Xenopus laevis) |
| Contig38901_RC | MGC45866 | 0.53 | MGC45866 | hypothetical protein MGC45866 |
| NM_001237 | CCNA2 | 0.53 | CCNA2 | cyclin A2 |
| NM_014791 | MELK | 0.53 | MELK | maternal embryonic leucine zipper kinase |
| NM_005733 | KIF20A | 0.53 | KIF20A | kinesin family member 20A |
| NM_018154 | ASF1B | 0.53 | ASF1B | ASF1 anti-silencing function 1 homolog B (S. cerevisiae) |
| NM_005542 | INSIG1 | 0.53 | INSIG1 | insulin induced gene 1 |
| NM_003600 | STK6 | 0.52 | STK6 | serine/threonine kinase 6 |
| NM_004701 | CCNB2 | 0.52 | CCNB2 | cyclin B2 |
| NM_004526 | MCM2 | 0.52 | MCM2 | MCM2 minichromosome maintenance |
| | | | | deficient 2, mitotin (S. cerevisiae) |
| U96131 | TRIP13 | 0.51 | TRIP13 | thyroid hormone receptor interactor 13 |
| NM_005192 | CDKN3 | 0.51 | CDKN3 | cyclin-dependent kinase inhibitor 3 (CDK2- |
| | | | | associated dual specificity phosphatase) |
| NM_001071 | TYMS | 0.51 | TYMS | thymidylate synthetase |
| Contig34952 | SHCBP1 | 0.51 | SHCBP1 | likely ortholog of mouse Shc SH2-domain |
| | | | | binding protein 1 |
| Contig46796_RC | C20orf172 | 0.51 | C20orf172 | chromosome 20 open reading frame 172 |
| Contig33814_RC | | 0.51 | ASPM | |
| NM_003626 | PPFIA1 | 0.51 | PPFIA1 | protein tyrosine phosphatase, receptor type, |
| | | | | f polypeptide (PTPRF), interacting protein |
| | | | | (liprin), alpha 1 |
| NW_016049 | LOC51016 | 0.51 | C14orf122 | |
| NM_003981 | PRC1 | 0.5 | PRC1 | |
| NM_006027 | EXO1 | 0.5 | EXO1 | exonuclease 1 |
| NM_004217 | STK12 | 0.5 | AURKB | aurora kinase B |
| NM_004162 | RAB5A | 0.5 | RAB5A | RAB5A, member RAS oncogene family |
| AL049685 | RAP2C | 0.5 | RAP2C | RAP2C, member of RAS oncogene family |
| AF052162 | FLJ12443 | 0.5 | FLJ12443 | hypothetical protein FLJ12443 |
| AL049949 | | −0.5 | FLJ90798 | |
| Contig31646_RC | COL14A1 | −0.5 | COL14A1 | collagen, type XIV, alpha 1 (undulin) |
| NM_003970 | MYOM2 | −0.5 | MYOM2 | myomesin (M-protein) 2, 165 kDa |
| Contig59870_RC | IRX1 | −0.5 | IRX1 | iroquois homeobox protein 1 |
| NM_013981 | NRG2 | −0.5 | NRG2 | neuregulin 2 |
| NM_000927 | ABCB1 | −0.5 | ABCB1 | ATP-binding cassette, sub-family B |
| | | | | (MDR/TAP), member 1 |
| AK001560 | NECL1 | −0.51 | NECL1 | nectin-like protein 1 |
| Contig52419_RC | JAM2 | −0.51 | JAM2 | junctional adhesion molecule 2 |
| Contig27623_RC | −0.51 | | | |
| NM_000114 | EDN3 | −0.51 | EDN3 | endothelin 3 |
| NM_002996 | CX3CL1 | −0.51 | CX3CL1 | chemokine (C—X3—C motif) ligand 1 |
| NM_013261 | PPARGC1 | −0.51 | PPARGC1 | |
| Contig46756_RC | SYN2 | −0.51 | SYN2 | synapsin II |
| NM_002405 | MFNG | −0.52 | MFNG | manic fringe homolog (Drosophila) |
| Contig43289_RC | | −0.52 | LOC170371 | |
| Contig45821_RC | ADCY4 | −0.52 | ADCY4 | adenylate cyclase 4 |
| NM_000820 | GAS6 | −0.52 | GAS6 | growth arrest-specific 6 |
| AF131817 | | −0.52 | CBFA2T1 | |
| Contig47308_RC | −0.52 | | | |
| Contig54993_RC | CLDN11 | −0.52 | CLDN11 | claudin 11 (oligodendrocyte transmembrane |
| | | | | protein) |
| NM_002001 | FCER1A | −0.52 | FCER1A | Fc fragment of IgE, high affinity I, receptor |
| | | | | for; alpha polypeptide |
| NM_000331 | SAA1 | −0.52 | SAA1 | serum amyloid A1 |
| NM_004787 | SLIT2 | −0.53 | SLIT2 | slit homolog 2 (Drosophila) |
| Contig43759_RC | | −0.53 | GRASP | |
| AL137698 | DKFZp434C1915 | −0.53 | PGM5 | phosphoglucomutase 5 |
| Contig42036_RC | BACH2 | −0.53 | BACH2 | BTB and CNC homology 1, basic leucine |
| | | | | zipper transcription factor 2 |
| NM_018286 | FLJ10970 | −0.54 | FLJ10970 | hypothetical protein FLJ10970 |
| Contig37198_RC | HSPA12B | −0.54 | HSPA12B | heat shock 70 kD protein 12B |
| NM_016602 | GPR2 | −0.54 | GPR2 | G protein-coupled receptor 2 |
| NM_004349 | CBFA2T1 | −0.54 | CBFA2T1 | core-binding factor, runt domain, alpha |
| | | | | subunit 2; translocated to, 1; cyclin D-related |
| AL110280 | | −0.54 | PAPLN | |
| NM_003012 | SFRP1 | −0.54 | SFRP1 | secreted frizzled-related protein 1 |
| NM_000109 | DMD | −0.54 | DMD | dystrophin (muscular dystrophy, Duchenne |
| | | | | and Becker types) |
| D00174 | SERPINF2 | −0.54 | SERPINF2 | serine (or cysteine) proteinase inhibitor, |
| | | | | clade F (alpha-2 antiplasmin, pigment |
| | | | | epithelium derived factor), member 2 |
| Contig42103_RC | | −0.55 | C20orf17 | chromosome 20 open reading frame 17 |
| Contig49869_RC | | −0.55 | | Homo sapiens cDNA FLJ31668 fis, clone |
| | | | | NT2RI2004916. |
| NM_001463 | FRZB | −0.55 | FRZB | frizzled-related protein |
| NM_004887 | CXCL14 | −0.55 | CXCL14 | chemokine (C—X—C motif) ligand 14 |
| AL080169 | DKFZP434C171 | −0.56 | DKFZP434C171 | DKFZP434C171 protein |
| NM_000587 | C7 | −0.56 | C7 | complement component 7 |
| NM_004615 | TM4SF2 | −0.56 | TM4SF2 | transmembrane 4 superfamily member 2 |
| NM_016250 | NDRG2 | −0.56 | NDRG2 | NDRG family member 2 |
| NM_003862 | FGF18 | −0.56 | FGF18 | fibroblast growth factor 18 |
| NM_012464 | TLL1 | −0.56 | TLL1 | tolloid-like 1 |
| Contig37540 | | −0.57 | | |
| Contig49279_RC | | −0.57 | FLJ25461 | hypothetical protein FLJ25461 |
| Contig26022_RC | MGC13057 | −0.58 | MGC13057 | hypothetical protein MGC13057 |
| NM_000076 | CDKN1C | −0.59 | CDKN1C | cyclin-dependent kinase inhibitor 1C (p57, |
| | | | | Kip2) |
| NM_004944 | DNASE1L3 | −0.6 | DNASE1L3 | deoxyribonuclease I-like 3 |
| NM_013999 | MEOX1 | −0.6 | MEOX1 | mesenchyme homeo box 1 |
| NM_005269 | GLI | −0.6 | GLI | glioma-associated oncogene homolog (zinc |
| | | | | finger protein) |
| NM_002101 | GYPC | −0.61 | GYPC | glycophorin C (Gerbich blood group) |
| NM_004867 | ITM2A | −0.61 | ITM2A | integral membrane protein 2A |
| NM_003956 | CH25H | −0.61 | CH25H | |
| NM_016815 | GYPC | −0.62 | GYPC | glycophorin C (Gerbich blood group) |
| NM_004527 | MEOX1 | −0.63 | MEOX1 | mesenchyme homeo box 1 |
| NM_003152 | STAT5A | −0.65 | STAT5A | signal transducer and activator of |
| | | | | transcription 5A |
| NM_002036 | FY | −0.67 | FY | Duffy blood group |

### 5.1.3 Identification of Markers

[0053] The present invention provides sets of markers for the identification of conditions or indications associated with breast cancer. Generally, the marker sets were identified by determining which of ˜25,000 human markers had expression patterns that correlate with the conditions or indications.

[0054] The methods for identification of sets of markers make use of measured cellular constituent profiles, e.g., expression profiles of a plurality of genes (e.g., measurements of abundance levels of the corresponding gene products), in tumor samples from a plurality of patients whose prognosis outcomes are known. The prognosis outcomes can be the prognosis at a predetermined time after initial diagnosis. The predetermined time can be any appropriate time period, e.g., 2, 3, 4, or 5 years. Prognosis markers can be obtained by identifying genes whose expression levels correlate with prognosis outcome, e.g., genes whose expression levels in good prognosis patients group are significantly different from those in poor prognosis patients. In preferred embodiments, the tumor samples from the plurality of patients are separated into a good prognosis group and a poor prognosis group for the predetermined time period. Genes whose expression levels exhibit differences between the good and poor prognosis groups to at least a predetermined level are selected as the genes whose expression levels correlate with patient prognosis. This section describes embodiments which employ genes and gene-derived nucleic acids as markers. However, it will be understood by a person skilled in the art that proteins or other cellular constituents may also be used as markers.

[0055] In a preferred embodiment, the expression profile is a differential expression profile. Each measurement in the profile is a differential expression level of a marker in a breast tumor sample versus that in a reference sample (also termed a standard or control sample). In one embodiment, the reference sample comprises polynucleotide molecules, derived from one or more samples from a plurality of normal individuals. For example, the normal individuals may be persons not having breast cancer. The standard or control may also comprise polynucleotide molecules, derived from one or more samples derived from individuals having a different form or stage of breast cancer; a different disease or different condition, or individuals exposed or subjected to a different condition, than the individual from which the sample of interest was obtained. The reference or control may be a sample, or set of samples, taken from the individual at an earlier time, for example, to assess the progression of a condition, or the response to a course of therapy.

[0056] In a preferred embodiment, the standard or control is a pool of target polynucleotide molecules derived from a plurality of different individuals. However, where protein levels, or the levels of any other relevant biomolecule, are to be compared, the pool may be a pool of proteins or the relevant biomolecule. In a preferred embodiment in the context of breast cancer, the pool comprises samples taken from a number of individuals having sporadic-type tumors.

[0057] In another preferred embodiment, the pool comprises an artificially-generated population of nucleic acids designed to approximate the level of nucleic acid derived from each marker found in a pool of marker-derived nucleic acids derived from tumor samples. In another embodiment, the pool, also called a “mathematical sample pool,” is represented by a set of expression values, rather than a set of physical polynucleotides; the level of expression of relevant markers in a sample from an individual with a condition, such as a disease, is compared to values representing control levels of expression for the same markers in the mathematical sample pool. Such a control may be a set of values stored on a computer. Such artificial or mathematical controls may be constructed for any condition of interest.

[0058] In another embodiment, the reference sample is derived from a normal breast cell line or a breast cancer cell line. Of course, where, for example, expressed proteins are used as markers, the proteins are obtained from the individual's sample, and the standard or control could be a pool of proteins from a number of normal individuals, or from a number of individuals having a particular state of a condition, such as a pool of samples from individuals having a particular prognosis of breast cancer.

[0059] In one embodiment, the method for identifying marker sets is as follows. After extraction and labeling of target polynucleotides, the expression of all markers (genes) in a sample X is compared to the expression of all markers in a standard or control. In one embodiment, the standard or control comprises target polynucleotide molecules derived from a sample from a normal individual (i.e., an individual not having breast cancer). In a preferred embodiment, the standard or control is a pool of target polynucleotide molecules. The pool may be derived from collected samples from a number of normal individuals. In a preferred embodiment, the pool comprises samples taken from a number of individuals having sporadic-type tumors. In another preferred embodiment, the pool comprises an artificially-generated population of nucleic acids designed to approximate the level of nucleic acid derived from each marker found in a pool of marker-derived nucleic acids derived from tumor samples. In yet another embodiment, the pool is derived from normal or breast cancer cell lines or cell line samples.

[0060] The comparison may be accomplished by any means known in the art. For example, expression levels of various markers may be assessed by separation of target polynucleotide molecules (e.g., RNA or cDNA) derived from the markers in agarose or polyacrylamide gels, followed by hybridization with marker-specific oligonucleotide probes. Alternatively, the comparison may be accomplished by the labeling of target polynucleotide molecules followed by separation on a sequencing gel. Polynucleotide samples are placed on the gel such that patient and control or standard polynucleotides are in adjacent lanes. Comparison of expression levels is accomplished visually or by means of densitometer. In a preferred embodiment, the expression of all markers is assessed simultaneously by hybridization to a microarray. In each approach, markers meeting certain criteria are identified as associated with breast cancer.

[0061] In one embodiment, genes are first screening genes based on significant variation in expression as compared to a standard or control sample in a set of breast cancer tumor samples. Genes may be screened, for example, by determining whether they show significant variation as compared to a standard or control sample in at least some samples among the set of samples. Genes that do not show significant variation in at least some samples in the set of samples are presumed not to be informative, and are discarded from further consideration. Genes showing significant variation in at least some samples in the sample set are retained as candidate informative genes. The degree of variation in expression of a gene may be estimated by determining a difference or ratio of the expression of the gene in a sample and a control. The difference or ratio of expression may be further transformed, e.g., by a linear or log transformation. Selection of candidate markers may be made based upon either significant up- or down-regulation of the gene in at least some samples in the set or based on the statistical significance (e.g., the p-value) of the variation in expression of the gene. Preferably, both selection criteria are used. Thus, in one embodiment of the present invention, genes showing both a more than two-fold change (increase or decrease) in expression as compared to a standard in at least three samples, and a p-value of variation in expression of the gene in the set of tumor samples as compared to the standard sample is no more than 0.01 (i.e., is statistically significant) are selected as candidate genes associated with prognosis of breast cancer.

[0062] Expression profiles comprising a plurality of different genes in a plurality of n breast cancer tumor samples can be used to identify markers that correlate with, and therefore are useful for discriminating, different clinical categories. In a specific embodiment using n tumor samples, markers are identified by calculation of correlation coefficients between the clinical category or clinical parameter(s) and the linear, logarithmic or any transform of the expression ratio across all samples for each individual gene. Specifically, the correlation coefficient may be calculated as:

ρ=(\vec{c}·\vec{r})/(∥\vec{c}∥·∥\vec{r}∥) Equation (1)

where \vec{c} represents the clinical parameters in the n tumor samples or categories and \vec{r} represents the measured expression levels of a gene in the n tumor samples, e.g., each element in \vec{r} can be the linear, logarithmic or any transform of the ratio of expression of the gene between a tumor sample and a control. Genes for which the coefficient of correlation exceeds a cutoff or threshold value are identified as breast cancer-related markers specific for a particular clinical type. Such a cutoff or threshold value may correspond to a certain significance of discriminating genes obtained by Monte Carlo simulations. The threshold depends upon the number of samples used, and can be calculated as 3×1/\sqrt{n−3}, where 1/\sqrt{n−3} is the distribution width and n=the number of samples. In a specific embodiment, markers are chosen if the correlation coefficient is greater than about 0.3 or less than about −0.3.

[0063] Next, the significance of the set of marker genes can be evaluated. The significance may be calculated by any appropriate statistical method. In a specific example, a Monte-Carlo technique is used to randomize the association between the expression profiles of the plurality of patients and the clinical categories to generate a set of randomized data. The same marker selection procedure as used to select the marker set is applied to the randomized data to obtain a control marker set. A plurality of such runs can be performed to generate a probability distribution of the number of genes in control marker sets. In a preferred embodiment, 10,000 such runs are performed. From the probability distribution, the probability of finding a marker set consisting of a given number of markers when no correlation between the expression levels and phenotype is expected (i.e., based randomized data) can be determined. The significance of the marker set obtained from the real data can be evaluated based on the number of markers in the marker set by comparing to the probability of obtaining a control marker set consisting of the same number of markers using the randomized data. In one embodiment, if the probability of obtaining a control marker set consisting of the same number of markers using the randomized data is below a given probability threshold, the marker set is said to be significant.

[0064] Once a marker set is identified, the markers may be rank-ordered in order of significance of discrimination. One means of rank ordering is by the amplitude of correlation between the change in gene expression of the marker and the specific condition being discriminated. Another, preferred, means is to use a statistical metric. In a specific embodiment, the metric is a Fisher-like statistic:

$$t = ( 〈 {x}_{1} 〉 - 〈 {x}_{2} 〉 ) / \sqrt{[ \begin{matrix}{σ}_{1}^{2} ( {n}_{1} - 1 ) + \\ {σ}_{2}^{2} ( {n}_{2} - 1 )\end{matrix} ] / ( {n}_{1} + {n}_{2} - 1 ) / ( 1 / {n}_{1} + 1 / {n}_{2} )} \qquad Equation ( 2 )$$

In this equation, |x₁> is the error-weighted average of the log ratio of transcript expression measurements within a first clinical group (e.g., good prognosis), <x₂> is the error-weighted average of log ratio within a second, related clinical group (e.g., poor prognosis), σ₁ is the variance of the log ratio within the first clinical group (e.g., good prognosis), n₁ is the number of samples for which valid measurements of log ratios are available, σ₂ is the variance of log ratio within the second clinical group (e.g., poor prognosis), and n₂ is the number of samples for which valid measurements of log ratios are available. The t-value represents the variance-compensated difference between two means. The rank-ordered marker set may be used to optimize the number of markers in the set used for discrimination.

[0065] The rank-ordered marker set may be used to optimize the number of markers in the set used for discrimination. This is accomplished generally in a “leave one out” method as follows. In a first run, a subset, for example 5, of the markers from the top of the ranked list is used to generate a template, where out of X samples, X−1 are used to generate the template, and the status of the remaining sample is predicted. This process is repeated for every sample until every one of the X samples is predicted once. In a second run, additional markers, for example 5, are added, so that a template is now generated from 10 markers, and the outcome of the remaining sample is predicted. This process is repeated until the entire set of markers is used to generate the template. For each of the runs, type 1 error (false negative) and type 2 errors (false positive) are counted; the optimal number of markers is that number where the type 1 error rate, or type 2 error rate, or preferably the total of type 1 and type 2 error rate is lowest.

[0066] For prognostic markers, validation of the marker set may be accomplished by an additional statistic, a survival model. This statistic generates the probability of tumor distant metastasis as a function of time since initial diagnosis. A number of models may be used, including Weibull, normal, log-normal, log logistic, log-exponential, or log-Rayleigh (Chapter 12 “Life Testing”, S-PLUS 2000 GUIDE TO STATISTICS, Vol. 2, p. 368 (2000)). For the “normal” model, the probability of distant metastasis P at time t is calculated as

P=α×exp(−t²/τ²) Equation (3)

where α is fixed and equal to 1, and τ is a parameter to be fitted and measures the “expected lifetime”.

[0067] It will be apparent to those skilled in the art that the above methods, in particular the statistical methods, described above, are not limited to the identification of markers associated with breast cancer, but may be used to identify set of marker genes associated with any phenotype. The phenotype can be the presence or absence of a disease such as cancer, or the presence or absence of any identifying clinical condition associated with that cancer. the phenotype may also be the response, or lack thereof, to a particular treatment regimen, for example, a course of one or more anticancer drugs. In the disease context, the phenotype may be a prognosis such as a survival time, probability of distant metastasis of a disease condition, or likelihood of a particular response to a therapeutic or prophylactic regimen. The phenotype need not be cancer, or a disease; the phenotype may be a nominal characteristic associated with a healthy individual.

[0068] In another embodiment, the invention provides an “iterative” method for the identification of sets of genes associated with a particular phenotype. An important aspect of this method is that samples, within a set of samples used to construct a classifier for the phenotype, that are incorrectly predicted using classifier templates constructed using all samples in the set, are discarded, and samples the phenotype of which is accurately predicted are retained. The retained samples are then used to construct a second classifier, which is more likely to contain a set of genes that reflects the dominant underlying molecular mechanism for the particular phenotype.

[0069] In one embodiment, therefore, the invention provides a method for determining a set of marker genes whose expression is associated with a particular phenotype, comprising the steps of: (a) selecting phenotype having two or more phenotype categories; (b) identifying a first plurality of genes, wherein the expression of said genes in a first plurality of samples is correlated or anticorrelated with one of the phenotype categories; (c) predicting the phenotype category of each sample in said plurality of samples based on the expression level of each of said plurality of genes across all other samples in said plurality of samples; (d) selecting those samples for which the phonotype category is correctly predicted, to form a second plurality of samples; and (e) identifying a second plurality of genes, wherein the expression of said genes in said second plurality of samples is correlated or anticorrelated with one of the phenotype categories; wherein said second plurality of genes is a set of marker genes whose expression is associated with a particular phenotype. In a specific embodiment, the phenotype is breast cancer. In a more specific embodiment, said phenotype categories are good prognosis and poor prognosis. In an even more specific embodiment, said good prognosis means no reoccurrence or metastasis within five years of initial diagnosis of breast cancer, and poor prognosis means reoccurrence or metastasis within five years of initial diagnosis of breast cancer. In another specific embodiment, said phenotype categories are response and non-response to a particular anticancer drug, or to a particular combination of anticancer drugs.

[0070] This iterative method, of course, may be applied to any disease or condition for which two or more phenotype categories exist. The method may be applied to the original generation of sets of markers informative for a particular phenotype and phenotype category(ies), and may be used to improve existing sets of markers that were selected by less robust means.

[0071] It should be noted that each of the markers identified as being phenotype and/or phenotype category-informative may be considered likely targets for therapeutics for that phenotype. For example, markers identified as breast cancer prognosis-informative represent genes, and/or their encoded proteins, that are targets for therapeutics against breast cancer.

### 5.1.4 Sample Collection

[0072] In the present invention, target polynucleotide molecules are extracted from a sample taken from an individual having breast cancer. The sample may be collected in any clinically acceptable manner, but must be collected such that marker-derived polynucleotides (i.e., RNA) are preserved. mRNA or nucleic acids derived therefrom (i.e., cDNA or amplified DNA) are preferably labeled distinguishably from standard or control polynucleotide molecules, and both are simultaneously or independently hybridized to a microarray comprising some or all of the markers or marker sets or subsets described above. Alternatively, mRNA or nucleic acids derived therefrom may be labeled with the same label as the standard or control polynucleotide molecules, wherein the intensity of hybridization of each at a particular probe is compared. A sample may comprise any clinically relevant tissue sample, such as a tumor biopsy or fine needle aspirate, or a sample of bodily fluid, such as blood, plasma, serum, lymph, ascitic fluid, cystic fluid, urine or nipple exudate. The sample may be taken from a human, or, in a veterinary context, from non-human animals such as ruminants, horses, swine or sheep, or from domestic companion animals such as felines and canines. The sample may also be paraffin-embedded tissue sections (see, e.g., U.S. Patent Application Publication No. 2005/0048542A1, which is incorporated by reference herein in its entirety). The expression profiles of paraffin-embedded tissue samples are preferably obtained using quantitative reverse transcriptase polymerase chain reaction qRT-PCR (see Section 5.4.2.7., infra).

[0073] Methods for preparing total and poly(A)+ RNA are well known and are described generally in Sambrook et al., MOLECULAR CLONING—A LABORATORY MANUAL (2ND ED.), Vols. 1-3, Cold Spring Harbor Laboratory, Cold Spring Harbor, N.Y. (1989)) and Ausubel et al., CURRENT PROTOCOLS IN MOLECULAR BIOLOGY, vol. 2, Current Protocols Publishing, New York (1994)).

[0074] RNA may be isolated from eukaryotic cells by procedures that involve lysis of the cells and denaturation of the proteins contained therein. Cells of interest include wild-type cells (i.e., non-cancerous), drug-exposed wild-type cells, tumor- or tumor-derived cells, modified cells, normal or tumor cell line cells, and drug-exposed modified cells.

[0075] Additional steps may be employed to remove DNA. Cell lysis may be accomplished with a nonionic detergent, followed by microcentrifigation to remove the nuclei and hence the bulk of the cellular DNA. In one embodiment, RNA is extracted from cells of the various types of interest using guanidinium thiocyanate lysis followed by CsCl centrifugation to separate the RNA from DNA (Chirgwin et al., Biochemistry 18:5294-5299 (1979)). Poly(A)+ RNA is selected by selection with oligo-dT cellulose (see Sambrook et al., MOLECULAR CLONING—A LABORATORY MANUAL (2ND ED.), Vols. 1-3, Cold Spring Harbor Laboratory, Cold Spring Harbor, N.Y. (1989). Alternatively, separation of RNA from DNA can be accomplished by organic extraction, for example, with hot phenol or phenol/chloroform/isoamyl alcohol.

[0076] If desired, RNAse inhibitors may be added to the lysis buffer. Likewise, for certain cell types, it may be desirable to add a protein denaturation/digestion step to the protocol.

[0077] For many applications, it is desirable to preferentially enrich mRNA with respect to other cellular RNAs, such as transfer RNA (tRNA) and ribosomal RNA (rRNA). Most mRNAs contain a poly(A) tail at their 3′ end. This allows them to be enriched by affinity chromatography, for example, using oligo(dT) or poly(U) coupled to a solid support, such as cellulose or Sephadex™ (see Ausubel et al., CURRENT PROTOCOLS IN MOLEcULAR BIOLOGY, vol. 2, Current Protocols Publishing, New York (1994). Once bound, poly(A)+ mRNA is eluted from the affinity column using 2 mM EDTA/0.1% SDS.

[0078] The sample of RNA can comprise a plurality of different mRNA molecules, each different mRNA molecule having a different nucleotide sequence. In a specific embodiment, the mRNA molecules in the RNA sample comprise at least 100 different nucleotide sequences. More preferably, the mRNA molecules of the RNA sample comprise mRNA molecules corresponding to each of the marker genes. In another specific embodiment, the RNA sample is a mammalian RNA sample.

[0079] In a specific embodiment, total RNA or mRNA from cells are used in the methods of the invention. The source of the RNA can be cells of a plant or animal, human, mammal, primate, non-human animal, dog, cat, mouse, rat, bird, yeast, eukaryote, prokaryote, etc. In specific embodiments, the method of the invention is used with a sample containing total mRNA or total RNA from 1×10⁶ cells or less. In another embodiment, proteins can be isolated from the foregoing sources, by methods known in the art, for use in expression analysis at the protein level.

[0080] Probes to the homologs of the marker sequences disclosed herein can be employed preferably wherein non-human nucleic acid is being assayed.

### 5.2 Methods of Using Breast Cancer Marker Sets

[0081] The present invention provides methods of using the marker sets to analyze a sample from an individual so as to determine the metastatic potential of an individual's tumor at a molecular level, i.e., to determine a prognosis for the individual from which the sample is obtained. The individual need not actually be having breast cancer. Essentially, the expression of specific marker genes in the individual, or a sample taken therefrom, is analyzed, e.g., compared to a standard or control, to determine if the pattern of expression indicates a good or a poor prognosis. For example, assuming two breast cancer-related conditions, X and Y, one can compare the levels of expression of breast cancer prognostic markers for condition X in an individual to the respective levels of the marker-derived polynucleotides in a control, wherein the levels of expression in the control represent the levels of expression of the markers exhibited by samples having condition X. In this instance, if the expression of the markers in the individual's sample is substantially (i.e., statistically) similar to that of the control, then the individual is said to have condition X, whereas if the expression of the markers in the individual's sample is substantially (i.e., statistically) different from that of the control, then the individual does not have condition X. Where, as here, the choice is bimodal (i.e., a sample is either X or Y), if the individual does not have condition X, the individual can additionally be said to have condition Y. For example, conditions X and Y can be a good prognosis and a poor prognosis, respectively, as defined by the particular disease or condition, such as breast cancer, and the particular clinical status of the individual. Of course, the comparison to a control representing condition Y can also be performed. In this instance, if the expression of the markers in the individual's sample is substantially (i.e., statistically) similar to that of the control, then the individual is said to have condition Y. Preferably both are performed simultaneously, such that each control acts as both a positive and a negative control. The distinguishing result may thus either be a demonstrable difference from the expression levels (i.e., the amount of marker-derived RNA, or polynucleotides derived therefrom) represented by the control, or no significant difference.

[0082] Thus, in one embodiment, the method of determining a particular tumor-related status of an individual comprises the steps of (1) hybridizing labeled target polynucleotides from the individual to a microarray containing one of the above marker sets; (2) hybridizing standard or control polynucleotides molecules to the microarray, wherein the standard or control molecules are differentially labeled from the target molecules; and (3) determining the difference in transcript levels, or lack thereof, between the target and standard or control, wherein the difference, or lack thereof, determines the individual's tumor-related status. In a more specific embodiment, the standard or control molecules comprise marker-derived polynucleotides from a pool of samples from normal individuals, or a pool of tumor samples from individuals having sporadic-type tumors. In a preferred embodiment, the standard or control is an artificially-generated pool of marker-derived polynucleotides, which pool is designed to mimic the level of marker expression exhibited by clinical samples of normal or breast cancer tumor tissue having a particular clinical indication (i.e., good prognosis or poor prognosis; no reoccurrence or metastasis within five years of initial diagnosis or reoccurrence or metastasis within five years of initial diagnosis; etc.). In another specific embodiment, the control molecules comprise a pool derived from normal or breast cancer cell lines.

[0083] The present invention provides sets of markers useful for distinguishing “good prognosis” from “poor prognosis” tumor types. In a preferred embodiment, “good prognosis” means no reoccurrence or metastasis, in the individual from which the sample was taken, within five years of initial diagnosis, and “poor prognosis” means reoccurrence or metastasis within five years of initial diagnosis. Thus, in one embodiment of the above method, the level of polynucleotides (i.e., mRNA or polynucleotides derived therefrom) in a sample from an individual, expressed from the different markers provided in any of Tables 1-8 are compared to the level of expression of the same markers from a control, wherein the control comprises marker-related polynucleotides derived from samples obtained from individuals with no 5-year reoccurrence or metastasis, samples take from individuals having reoccurrence or metastasis within five years, or both. Preferably, the comparison is to both, and preferably the comparison is to polynucleotide pools from a number of “good prognosis” and “poor prognosis” samples, respectively. Where, for example, the individual's marker expression most closely resembles or correlates with the “good prognosis” control, and does not resemble or correlate with the “poor prognosis” control, the individual is classified as having a good prognosis. Where the pool is not pure “good prognosis” or “poor prognosis,” for example, a sporadic pool may be used. A set of experiments should be performed in which nucleic acids from individuals with known prognosis status are hybridized against the pool, in order to define the expression templates for the “good prognosis” and “poor prognosis” group. Nucleic acids from each individual with unknown prognosis status are hybridized against the same pool and the expression profile is compared to the template(s) to determine the individual's prognosis.

[0084] The control or standard may be presented in a number of different formats. For example, the control, or template, to which the expression of marker genes in a breast cancer tumor sample is compared may be the average absolute level of expression of each of the genes in a pool of marker-derived nucleic acids pooled from breast cancer tumor samples obtained from a plurality of breast cancer patients. In this case, the difference between the absolute level of expression of these genes in the control and in a sample from a breast cancer patient provides the degree of similarity or dissimilarity of the level of expression in the patient sample and the control. The absolute level of expression may be measured by the intensity of the hybridization of the nucleic acids to an array. In other embodiments, the values for the expression levels of the markers in both the patient sample and control are transformed (see Section 5.4.3). For example, the expression level value for the patient, and the average expression level value for the pool, for each of the marker genes selected, may be transformed by taking the logarithm of the value. Moreover, the expression level values may be normalized by, for example, dividing by the median hybridization intensity of all of the samples that make up the pool. The control may be derived from hybridization data obtained simultaneously with the patient sample expression data, or may constitute a set of numerical values stores on a computer, or on computer-readable medium.

[0085] In one embodiment, the invention provides for method of determining whether an individual having breast cancer will likely experience a relapse within five years of initial diagnosis (i.e., whether an individual has a poor prognosis) comprising (1) comparing the level of expression of at least ten of the different markers listed in any of Tables 1-8 in a sample taken from the individual to the level of the same markers in a standard or control, where the standard or control levels represent those found in an individual with a poor prognosis; and (2) determining whether the level of the marker-related polynucleotides in the sample from the individual is significantly different than that of the control, wherein if no substantial difference is found, the patient has a poor prognosis, and if a substantial difference is found, the patient has a good prognosis. Persons of skill in the art will readily see that the markers associated with good prognosis can also be used as controls. In a more specific embodiment, both controls are run.

[0086] Poor prognosis of breast cancer may indicate that a tumor is relatively aggressive, while good prognosis may indicate that a tumor is relatively nonaggressive. Therefore, the invention provides for a method of determining a course of treatment of a breast cancer patient, comprising determining whether the level of expression of at least 10 of the different markers listed in any of Tables 1-8, or one or more subsets thereof, correlates with the level of these markers in a sample representing a good prognosis expression pattern or a poor prognosis pattern; and determining a course of treatment, wherein if the expression correlates with the poor prognosis pattern, the tumor is treated as an aggressive tumor.

[0087] For the embodiments of the methods described in this section, any of the marker sets described in Section 5.1.2. can be used. For example, the full set of markers may be used (i.e., the complete set of different markers shown in any of Tables 1-8). Alternatively, all markers disclosed herein may be used, i.e., all 387 prognosis-informative markers. In other embodiments, subsets of the markers may be used. In a preferred embodiment, the prognosis of an individual is determined using the markers listed in any of Tables 1-4 are used. In another preferred embodiment, the individual is identified as being ER+, and the prognosis of an individual is determined using the markers listed in any of Tables 5-8 are used. An individual may be identified as ER+ or ER− by an acceptable means (e.g., northern blot analysis, SDS-PAGE analysis, or microarray analysis). The level of expression of the ER gene alone may be determined, whereby, for example, if the level of expression is, or is nearly, zero, the individual is ER−, and higher levels of expression indicate that the individual is ER+. Alternatively, one may identify an sample as ER− or ER+ using gene expression levels, for example, those disclosed in International Application Publication No. WO 02/103320. In other embodiments, the prognosis of an individual may be determined using one or more subsets of at least 10, 15, 20, 25, 30, 40, 50, 75, 100, 125, 150, or 175 of the different markers present in any one or more of Tables 1-8 (SEQ ID NOS:1-387), up to the total number of markers 387.

[0088] In other preferred embodiments, the prognosis of an individual is determined using only those markers listed in Table 1, Table 2, Table 3, Table 4, Table 5, Table 6, Table 7 or Table 8. In other embodiments, the prognosis of an individual may be determined using one or more subsets of at least 10, 15, 20, 25, 30, 40, 50, 75, 100, 125, 150, or 175 of the different markers present in any of Tables 1-8, up to the total number of markers in a Table. In other embodiments, the prognosis of an individual may be determined using one or more subsets of no more than 10, 15, 20, 25, 30, 40, 50, 75, 100, 125, 150, or 175 of the different markers present in any of Tables 1-8, up to the total number of markers in a Table. In a preferred embodiment, where the individual is ER+, the different markers, or subsets of different markers, used are those listed in any of Tables 5-8.

[0089] The invention provides a method for determining a prognosis of an individual having breast cancer, comprising classifying said individual as having a good prognosis or a poor prognosis based on an expression profile comprising measurements of expression levels of a plurality of genes in a cell sample taken from the individual, said plurality of genes comprising 10 different genes corresponding to the markers listed in any one or more of Tables 1, 3, 5 and 7 (SEQ ID NOS:1-387), wherein a good prognosis predicts no reoccurrence or metastasis within a predetermined period after initial diagnosis, and wherein a poor prognosis predicts reoccurrence or metastasis within said predetermined period after initial diagnosis. In one embodiment, the patient's cellular constituent profile comprising measurements of a set of markers, e.g., expression levels of marker genes, is evaluated to determine whether the profile indicates good prognosis or poor prognosis. In a preferred embodiment, the patient's prognosis is evaluated by comparing the cellular constituent profile to a predetermined cellular constituent template profile corresponding to a certain prognosis, e.g., a good prognosis template comprising measurements of the plurality of cellular constituents which are representative of levels of the cellular constituents in a plurality of good prognosis patients or a poor prognosis template comprising measurements of the plurality of cellular constituents which are representative of levels of the cellular constituents in a plurality of poor prognosis patients. Herein a good prognosis patient is a patient who has no reoccurrence or metastasis within a period of time after initial diagnosis, e.g., a period of 1, 2, 3, 4, 5 or 10 years, and a poor prognosis patient is a patient who has reoccurrence or metastasis within a period of time after initial diagnosis, e.g., a period of 1, 2, 3, 4, 5 or 10 years. In a preferred embodiment, both periods are 5 years.

[0090] The degree of similarity of the patient's cellular constituent profile to a template representing good or poor prognosis can be used to indicate whether the patient has good or poor prognosis. In a preferred embodiment, a patient is classified as having a good prognosis profile if the patient's cellular constituent profile has a high similarity to a good prognosis template, e.g., a similarity to a good prognosis template above a predetermined threshold value; and/or has a low similarity to a poor prognosis template, e.g., a similarity to a poor prognosis template no higher than a predetermined threshold value. In another embodiment, a patient is classified as having a poor prognosis profile if the patient's cellular constituent profile has a low similarity to a good prognosis template and/or has a high similarity to a poor prognosis template.

[0091] The similarity between the marker expression profile of an individual and that of a control or template can be assessed in a number of ways. In the simplest case, the profiles can be compared visually in a printout of expression difference data. Alternatively, the similarity can be calculated mathematically.

[0092] In one embodiment, the similarity between two patients x and y, or patient x and a template y, expressed as a similarity value, can be calculated using the following equation:

$$S = 1 - [ \begin{matrix}{\sum }_{i = 1}^{{N}_{v}} \frac{( {x}_{i} - \overline{x} )}{{σ}_{{x}_{i}}} \frac{( {y}_{i} - \overline{y} )}{{σ}_{{y}_{i}}} / \\ \sqrt{{\sum }_{i = 1}^{{N}_{v}} {( \frac{{x}_{i} - \overline{x}}{{σ}_{{x}_{i}}} )}^{2} {\sum }_{i = 1}^{{N}_{v}} {( \frac{{y}_{i} - \overline{y}}{{σ}_{{y}_{i}}} )}^{2}}\end{matrix} ] \qquad Equation ( 4 )$$

In this equation, x and y are two patients with components of log ratio xᵢ and yᵢ, i=1, . . . , N. Associated with every value xᵢ is error σₓ_{ᵢ}. The smaller the value of σₓ_{ᵢ}, the more reliable the measurement xᵢ. The error-weighted arithmetic mean may be calculated using the following formula:

$$\overline{x} = {\sum }_{i = 1}^{{N}_{v}} \frac{{x}_{i}}{{σ}_{{x}_{i}}^{2}} / {\sum }_{i = 1}^{{N}_{v}} \frac{1}{{σ}_{{x}_{i}}^{2}} \qquad Equation ( 5 )$$

[0093] In a preferred embodiment, templates are developed for sample comparison. The template can be defined as the error-weighted log ratio average of the expression difference for the group of marker genes able to differentiate the particular breast cancer-related condition. For example, templates are defined for “good prognosis” samples and for “poor prognosis” samples. Next, a classifier parameter is calculated. This parameter may be calculated using either expression level differences between the sample and template, or by calculation of a correlation coefficient. In one embodiment, the similarity is represented by a correlation coefficient between the patient's profile and the template. In one embodiment, a correlation coefficient above a correlation threshold indicates high similarity, whereas a correlation coefficient below the threshold indicates low similarity. In preferred embodiments, the correlation threshold is set as 0.3, 0.4, 0.5 or 0.6. In another embodiment, similarity between a patient's profile and a template is represented by a distance between the patient's profile and the template. In one embodiment, a distance below a given value indicates high similarity, whereas a distance equal to or greater than the given value indicates low similarity.

[0094] Either one or both of the two classifier parameters (P₁ and P₂) can then be used to measure degrees of similarities between a patient's profile and the templates: P₁ measures the similarity between the patient's profile \vec{y} and the good prognosis template \vec{z}₁, and P₂ measures the similarity between \vec{y} and the poor prognosis template \vec{z}₂. Such a coefficient, Pᵢ, can be calculated using the following equation:

Pᵢ=(\vec{z}ᵢ·\vec{y})/(∥\vec{z}ᵢ∥·∥\vec{y}∥) Equation (6).

Thus, in one embodiment, \vec{y} is classified as a good prognosis profile if P₁ is greater than a selected correlation threshold or if P₂ is equal to or less than a selected correlation threshold. In another embodiment, \vec{y} is classified as a poor prognosis profile if P₁ is less than a selected correlation threshold or if P₂ is above a selected correlation threshold. In still another embodiment, \vec{y} is classified as a good prognosis profile if P₁ is greater than a first selected correlation threshold and \vec{y} is classified as a poor prognosis profile if P₂ is greater than a second selected correlation threshold.

[0095] Thus, in a more specific embodiment, the above method of determining a particular tumor-related status of an individual, i.e., prognosis, comprises the steps of (1) hybridizing labeled target polynucleotides from an individual to a microarray containing one of the above marker sets; (2) hybridizing standard or control polynucleotides molecules to the microarray, wherein the standard or control molecules are differentially labeled from the target molecules; and (3) determining the ratio (or difference) of transcript levels between two channels (individual and control), or simply the transcript levels of the individual; and (4) comparing the results from (3) to the predefined templates, wherein said determining is accomplished by means of the statistic of Equation 4 or Equation 6, and wherein the difference, or lack thereof, determines the individual's tumor-related status (for example, prognosis).

[0096] The invention further provides a method for classifying a breast cancer patient according to prognosis, comprising comparing the levels of expression of at least 10 of the different genes for which markers are listed in any of Tables 1-8 in a cell sample taken from said breast cancer patient to control levels of expression of said at least five genes; and classifying said breast cancer patient according to prognosis of his or her breast cancer based on the similarity between said levels of expression in said cell sample and said control levels. In a more specific embodiment, the second step of this method comprises determining whether said similarity exceeds one or more predetermined threshold values of similarity. In another more specific embodiment of this method, said control levels are the mean levels of expression of each of said at least ten genes in a pool of tumor samples obtained from a plurality of breast cancer patients having a good prognosis, e.g., who have no metastasis within five years of initial diagnosis. In another more specific embodiment of this method, said control levels comprise the expression levels of said genes in breast cancer patients who have had no metastasis within five years of initial diagnosis. In yet another more specific embodiment of this method, said control levels comprise, for each of said at least ten of the different genes for which markers are listed in any of Tables 1-8, mean log intensity values stored on a computer. In yet another more specific embodiment of this method, said control levels comprise, for each of said at least ten of the genes for which markers are listed in any of Tables 1-8, mean log intensity values stored on a computer. The set of mean log intensity values listed in this table may be used as a “good prognosis” template for any of the prognostic methods described herein. The above method may also compare the level of expression of at least 10, 20, 30, 40, 50, 75, 100 or more different genes for which markers listed in any of Tables 1-8, or each of the genes for which markers are listed in Table 1, Table 2, Table 3, Table 4, Table 5, Table 6, Table 7 or Table 8.

[0097] The present invention further provides a method of further classifying “good prognosis” patients into two groups: those having a “very good prognosis” and those having an “intermediate prognosis.” For each of the above classifications, the invention further provides recommended therapeutic regimens.

[0098] The present invention also provides for the classification of a breast cancer patient into one of three prognostic categories comprising (a) determining the similarity between the level of expression of at least ten of the different genes for which markers are listed in any of Tables 1-8 to control levels of expression to obtain a patient similarity value; (b) providing a first threshold similarity value that differentiates persons having a good prognosis from those having a poor prognosis, and providing determining a second threshold similarity value, where said second threshold similarity value indicates a higher degree of similarity of the expression of said genes to said control than said first similarity value; and (c) classifying the breast cancer patient into a first prognostic category if the patient similarity value exceeds the first and second threshold similarity values, a second prognostic category if the patient similarity value equals or exceeds the first but not the second threshold similarity value, and a third prognostic category if the patient similarity value is less than the first threshold similarity value. In a more specific embodiment, the levels of expression of each of said at least five genes is determined first. As above, the control comprises marker-related polynucleotides derived from breast cancer tumor samples taken from breast cancer patients clinically determined to have a good prognosis (“good prognosis” control), breast cancer patients clinically determined to have a poor prognosis “poor prognosis” control), or both. In a preferred embodiment, the control is a “good prognosis” control or template, i.e., a control or template comprising the mean levels of expression of said genes in breast cancer patients who have had no distant metastasis within five years of initial diagnosis. In another more specific embodiment, said control levels comprise a set of values, for example mean log intensity values, preferably normalized, stored on a computer. In another specific embodiment, said determining in step (a) may be accomplished by a method comprising determining the difference between the absolute expression level of each of said genes and the average expression level of the same genes in a pool of tumor samples obtained from a plurality of breast cancer patients who have had no relapse of breast cancer within five years of initial diagnosis. In another specific embodiment, said determining in step (a) may be accomplished by a method comprising determining the degree of similarity between the level of expression of each of said genes in a breast cancer tumor sample taken from a breast cancer patient and the level of expression of the same genes in a pool of tumor samples obtained from a plurality of breast cancer patients who have had no relapse of breast cancer within five years of initial diagnosis.

[0099] In a specific embodiment of the above method, said first threshold similarity value and said second threshold similarity values are selected by a method comprising (a) rank ordering in descending order said tumor samples that compose said pool of tumor samples by the degree of similarity between the level of expression of said genes in each of said tumor samples to the mean level of expression of the same genes of the remaining tumor samples that compose said pool to obtain a rank-ordered list, said degree of similarity being expressed as a similarity value; (b) determining an acceptable number of false negatives in said classifying, wherein said false negatives are breast cancer patients for whom the expression levels of said at least ten of the different genes for which markers are listed in any of Tables 1-8 in said cell sample predicts that said patient will have no distant metastasis within the first five years after initial diagnosis, but who has had a distant metastasis within the first five years after initial diagnosis; (c) determining a similarity value above which in said rank ordered list fewer than said acceptable number of tumor samples are false negatives; and (d) selecting said similarity value determined in step (c) as said first threshold similarity value; and (e) selecting a second similarity value, greater than said first similarity value, as said second threshold similarity value. In an even more specific embodiment of this method, said second threshold similarity value is selected in step (e) by a method comprising determining which of said tumor samples, taken from patients having a distant metastasis within five years of initial diagnosis, in said rank ordered list has the greatest similarity value, and selecting said greatest similarity value as said second threshold similarity value. In even more specific embodiments, said first and second threshold similarity values are correlation coefficients, and said first threshold similarity value is 0.4 and said second threshold similarity value is greater than 0.4. In another specific embodiment, said first similarity value is a similarity value above which at most 10% false negatives are predicted in a training set of tumors, and said second correlation coefficient is a coefficient above which at most 5% false negatives are predicted in said training set of tumors. In another specific embodiment, said first correlation coefficient is a coefficient above which 10% false negatives are predicted in a training set of tumors, and said second correlation coefficient is a coefficient above which no false negatives are predicted in said training set of tumors. In the above and other embodiments, “false negatives” are patients classified by the expression of the marker genes as having a good prognosis, or who are predicted by such expression to have a good prognosis, but who actually do develop distant metastasis within five years.

[0100] In a specific embodiment of the above methods, the first, second and third prognostic categories are characterized as “very good prognosis,” “intermediate prognosis,” and “poor prognosis,” respectively. Patients classified into the first prognostic category (“very good prognosis”) are likely not to have a distant metastasis within five years of initial diagnosis. Patients classified as having an “intermediate prognosis” are also unlikely to have a distant metastasis within five years of initial diagnosis, but may be recommended to undergo a different therapeutic regimen than patients having a “very good prognosis” marker gene expression profile (see below). Patients classified into the third prognostic category (“poor prognosis”) are likely to have a distant metastasis within five years of initial diagnosis.

[0101] In a more specific embodiment, the similarity value is the degree of difference between the absolute (i.e., untransformed) level of expression of each of the genes in a tumor sample taken from a breast cancer patient and the mean absolute level of expression of the same genes in a control. In another more specific embodiment, the similarity value is calculated using expression level data that is transformed. In another more specific embodiment, the similarity value is expressed as a similarity metric, such as a correlation coefficient, representing the similarity between the level of expression of the marker genes in the tumor sample and the mean level of expression of the same genes in a plurality of breast cancer tumor samples taken from breast cancer patients.

[0102] In another specific embodiment, said first and second similarity values are derived from control expression data obtained in the same hybridization experiment as that in which the patient expression level data is obtained. In another specific embodiment, said first and second similarity values are derived from an existing set of expression data. In a more specific embodiment, said first and second correlation coefficients are derived from a mathematical sample pool. For example, comparison of the expression of marker genes in new tumor samples may be compared to the pre-existing template determined for these genes for patients in a previous study; the template, or average expression levels of each of the marker genes can be used as a reference or control for any tumor sample. Preferably, the comparison is made to a template comprising the average expression level of at least ten of the different genes listed in any of Tables 1-8 for the 108 out of 153 patients (see Examples) clinically determined to have a good prognosis. The coefficient of correlation of the level of expression of these genes in the tumor sample to the “good prognosis” patient template is then determined to produce a tumor correlation coefficient. For this control patient set, two similarity values may be derived: a first correlation coefficient that minimizes Type 1 and Type 2 error, and a second correlation coefficient that is higher than the first correlation coefficient. The second correlation coefficient is that of the actual poor prognosis sample in the rank-ordered list of samples having the highest correlation to the “good prognosis” template. The value of the second correlation coefficient will depend upon the set of samples selected for generation of the template. New breast cancer patients whose coefficients of correlation of the expression of these marker genes with the “good prognosis” template equal or exceed the second correlation coefficient are classified as having a “very good prognosis”; those having a coefficient of correlation of between the first and second correlation coefficients are classified as having an “intermediate prognosis”; and those having a correlation coefficient lower than the first correlation coefficient are classified as having a “poor prognosis.”

[0103] Because the above methods may utilize arrays to which fluorescently-labeled marker-derived target nucleic acids are hybridized, the invention also provides a method of classifying a breast cancer patient according to prognosis, e.g., a breast cancer patient 55+ years of age or older, comprising the steps of (a) contacting first nucleic acids derived from a tumor sample taken from said breast cancer patient, and second nucleic acids derived from two or more tumor samples from breast cancer patients who have had no distant metastasis within five years of initial diagnosis, with an array under conditions such that hybridization can occur, detecting at each of a plurality of discrete loci on said array a first fluorescent emission signal from said first nucleic acids and a second fluorescent emission signal from said second nucleic acids that are bound to said array under said conditions, wherein said array comprises at least ten of the different genes for which markers are listed in any of Tables 1-4 and wherein at least 50% of the probes on said array are listed in Tables 1-8; (b) calculating the similarity between said first fluorescent emission signals and said second fluorescent emission signals across said at least ten genes; and (c) classifying said breast cancer patient according to prognosis of his or her breast cancer based on the similarity between said first fluorescent emission signals and said second fluorescent emission signals across said at least ten genes.

[0104] Once patients have been classified as having a “very good prognosis,” “intermediate prognosis” or “poor prognosis,” this information can be combined with the patient's clinical data to determine an appropriate treatment regimen. In one embodiment, the patient's lymph node metastasis status (i.e., whether the patient is pN+ or pN0) is determined. Patients who are pN0 and have a “very good prognosis” or “intermediate” expression profile may be treated without adjuvant chemotherapy. All other patients should be treated with adjuvant chemotherapy. In a more specific embodiment, the patient's estrogen receptor status is also identified (i.e., whether the patient is ER+ or ER−). Here, patients classified as having an “intermediate prognosis” or “poor prognosis” who are ER+ are assigned a therapeutic regimen that additionally comprises adjuvant hormonal therapy.

[0105] Thus, the invention provides for a method of assigning a therapeutic regimen to a breast cancer patient, e.g., a breast cancer patient 55+ years of age or older, comprising (a) classifying said patient as having a “poor prognosis,” “intermediate prognosis,” or “very good prognosis” on the basis of the levels of expression of at least ten of the different genes for which markers are listed in any of Tables 1-8; and (b) assigning said patient a therapeutic regimen, said therapeutic regimen comprising no adjuvant chemotherapy if the patient is lymph node negative and is classified as having a good prognosis or an intermediate prognosis, or comprising chemotherapy if said patient has any other combination of lymph node status and expression profile. In another embodiment, the invention provides a method for assigning a therapeutic regimen for a breast cancer patient, comprising determining the lymph node status for said patient; determining the level of expression of at least ten of the different genes listed in any of Tables 1-8 in a tumor sample from said patient, thereby generating an expression profile; classifying said patient as having a “poor prognosis”, “intermediate prognosis” or “very good prognosis” on the basis of said expression profile; and assigning the patient a therapeutic regimen, said therapeutic regimen comprising no adjuvant chemotherapy if the patient is lymph node negative and is classified as having a good prognosis or an intermediate prognosis, or a therapeutic regiment comprising chemotherapy if said patient has any other combination of lymph node status and expression profile. In a more specific embodiment of the above methods, the ER status of the patient is additionally determined, and if the breast cancer patient is ER(+) and has an intermediate or poor prognosis, the therapeutic regimen additionally comprises hormonal therapy. In another more specific embodiment is to determine the lymph node status and expression profiles, and to assign intermediate prognosis patients adjuvant hormonal therapy (whether or not ER status has been determined). In another specific embodiment, the breast cancer patient is premenopausal. In another specific embodiment, the breast cancer patient has stage I or stage II breast cancer.

[0106] The use of marker sets is not restricted to the prognosis of breast cancer-related conditions, and may be applied in a variety of phenotypes or conditions, clinical or experimental, in which gene expression plays a role. Where a set of markers has been identified that corresponds to two or more phenotypes, the marker set can be used to distinguish these phenotypes. For example, the phenotypes may be the diagnosis and/or prognosis of clinical states or phenotypes associated with other cancers, other disease conditions, or other physiological conditions, wherein the expression level data is derived from a set of genes correlated with the particular physiological or disease condition. Further, the expression of markers specific to other types of cancer may be used to differentiate patients or patient populations for those cancers for which different therapeutic regimens are indicated.

### 5.3 Improving Sensitivity to Expression Level Differences

[0107] In using the markers disclosed herein, and, indeed, using any sets of markers to differentiate an individual having one phenotype from another individual having a second phenotype, one can compare the absolute expression of each of the markers in a sample to a control; for example, the control can be the average level of expression of each of the markers, respectively, in a pool of individuals. To increase the sensitivity of the comparison, however, the expression level values are preferably transformed in a number of ways.

[0108] For example, the expression level of each of the markers can be normalized by the average expression level of all markers the expression level of which is determined, or by the average expression level of a set of control genes. Thus, in one embodiment, the markers are represented by probes on a microarray, and the expression level of each of the markers is normalized by the mean or median expression level across all of the genes represented on the microarray, including any non-marker genes. In a specific embodiment, the normalization is carried out by dividing the median or mean level of expression of all of the genes on the microarray. In another embodiment, the expression levels of the markers are normalized by the mean or median level of expression of a set of control markers. In a specific embodiment, the control markers comprise a set of housekeeping genes. In another specific embodiment, the normalization is accomplished by dividing by the median or mean expression level of the control genes.

[0109] The sensitivity of a marker-based assay will also be increased if the expression levels of individual markers are compared to the expression of the same markers in a pool of samples. Preferably, the comparison is to the mean or median expression level of each the marker genes in the pool of samples. Such a comparison may be accomplished, for example, by dividing by the mean or median expression level of the pool for each of the markers from the expression level each of the markers in the sample. This has the effect of accentuating the relative differences in expression between markers in the sample and markers in the pool as a whole, making comparisons more sensitive and more likely to produce meaningful results that the use of absolute expression levels alone. The expression level data may be transformed in any convenient way; preferably, the expression level data for all is log transformed before means or medians are taken.

[0110] In performing comparisons to a pool, two approaches may be used. First, the expression levels of the markers in the sample may be compared to the expression level of those markers in the pool, where nucleic acid derived from the sample and nucleic acid derived from the pool are hybridized during the course of a single experiment. Such an approach requires that new pool nucleic acid be generated for each comparison or limited numbers of comparisons, and is therefore limited by the amount of nucleic acid available. Alternatively, and preferably, the expression levels in a pool, whether normalized and/or transformed or not, are stored on a computer, or on computer-readable media, to be used in comparisons to the individual expression level data from the sample (i.e., single-channel data).

[0111] Thus, the current invention provides the following method of classifying a first cell or organism as having one of at least two different phenotypes, where the different phenotypes comprise a first phenotype and a second phenotype. The level of expression of each of a plurality of genes in a first sample from the first cell or organism is compared to the level of expression of each of said genes, respectively, in a pooled sample from a plurality of cells or organisms, the plurality of cells or organisms comprising different cells or organisms exhibiting said at least two different phenotypes, respectively, to produce a first compared value. The first compared value is then compared to a second compared value, wherein said second compared value is the product of a method comprising comparing the level of expression of each of said genes in a sample from a cell or organism characterized as having said first phenotype to the level of expression of each of said genes, respectively, in the pooled sample. The first compared value is then compared to a third compared value, wherein said third compared value is the product of a method comprising comparing the level of expression of each of the genes in a sample from a cell or organism characterized as having the second phenotype to the level of expression of each of the genes, respectively, in the pooled sample. Optionally, the first compared value can be compared to additional compared values, respectively, where each additional compared value is the product of a method comprising comparing the level of expression of each of said genes in a sample from a cell or organism characterized as having a phenotype different from said first and second phenotypes but included among the at least two different phenotypes, to the level of expression of each of said genes, respectively, in said pooled sample. Finally, a determination is made as to which of said second, third, and, if present, one or more additional compared values, said first compared value is most similar, wherein the first cell or organism is determined to have the phenotype of the cell or organism used to produce said compared value most similar to said first compared value.

[0112] In a specific embodiment of this method, the compared values are each ratios of the levels of expression of each of said genes. In another specific embodiment, each of the levels of expression of each of the genes in the pooled sample is normalized prior to any of the comparing steps. In a more specific embodiment, the normalization of the levels of expression is carried out by dividing by the median or mean level of the expression of each of the genes or dividing by the mean or median level of expression of one or more housekeeping genes in the pooled sample from said cell or organism. In another specific embodiment, the normalized levels of expression are subjected to a log transform, and the comparing steps comprise subtracting the log transform from the log of the levels of expression of each of the genes in the sample. In another specific embodiment, the two or more different phenotypes are different stages of a disease or disorder. In still another specific embodiment, the two or more different phenotypes are different prognoses of a disease or disorder. In yet another specific embodiment, the levels of expression of each of the genes, respectively, in the pooled sample or said levels of expression of each of said genes in a sample from the cell or organism characterized as having the first phenotype, second phenotype, or said phenotype different from said first and second phenotypes, respectively, are stored on a computer or on a computer-readable medium.

[0113] In a specific embodiment, the two phenotypes are good prognosis and poor prognosis. In a more specific embodiment, the two phenotypes are no metastasis within five years of initial diagnosis of breast cancer, and reoccurrence or metastasis within five years of initial diagnosis of breast cancer.

[0114] In another specific embodiment, the comparison is made between the expression of each of the genes in the sample and the expression of the same genes in a pool representing only one of two or more phenotypes. In the context of prognosis-correlated genes, for example, one can compare the expression levels of prognosis-related genes in a sample to the average level of the expression of the same genes in a “good prognosis” pool of samples (as opposed to a pool of samples that include samples from patients having poor prognoses and good prognoses). Thus, in this method, a sample is classified as having a good prognosis if the level of expression of prognosis-correlated genes exceeds a chosen coefficient of correlation to the average “good prognosis” expression profile (i.e., the level of expression of prognosis-correlated genes in a pool of samples from patients having a “good prognosis.” Patients whose expression levels correlate more poorly with the “good prognosis” expression profile (i.e., whose correlation coefficient fails to exceed the chosen coefficient) are classified as having a poor prognosis. The method can be applied to subdivisions of these prognostic classes. For example, in a specific embodiment, the phenotype is good prognosis and said determination comprises (1) determining the coefficient of correlation between the expression of said plurality of genes in the sample and of the same genes in said pooled sample; (2) selecting a first correlation coefficient value between 0.4 and +1 and a second correlation coefficient value between 0.4 and +1, wherein said second value is larger than said first value; and (3) classifying said sample as “very good prognosis” if said coefficient of correlation equals or is greater than said second correlation coefficient value, “intermediate prognosis” if said coefficient of correlation equals or exceeds said first correlation coefficient value, and is less than said second correlation coefficient value, or “poor prognosis” if said coefficient of correlation is less than said first correlation coefficient value.

[0115] Of course, single-channel data may also be used without specific comparison to a mathematical sample pool. For example, a sample may be classified as having a first or a second phenotype, wherein the first and second phenotypes are related, by calculating the similarity between the expression of at least 5 markers in the sample, where the markers are correlated with the first or second phenotype, to the expression of the same markers in a first phenotype template and a second phenotype template, by (a) labeling nucleic acids derived from a sample with a fluorophore to obtain a pool of fluorophore-labeled nucleic acids; (b) contacting said fluorophore-labeled nucleic acid with a microarray under conditions such that hybridization can occur, detecting at each of a plurality of discrete loci on the microarray a flourescent emission signal from said fluorophore-labeled nucleic acid that is bound to said microarray under said conditions; and (c) determining the similarity of marker gene expression in the individual sample to the first and second templates, wherein if said expression is more similar to the first template, the sample is classified as having the first phenotype, and if said expression is more similar to the second template, the sample is classified as having the second phenotype.

### 5.4 Determination of Marker Gene Expression Levels

### 5.4.1 Methods

[0116] The expression levels of the marker genes in a sample may be determined by any means known in the art. The expression level may be determined by isolating and determining the level (i.e., amount) of nucleic acid transcribed from each marker gene. Alternatively, or additionally, the level of specific proteins translated from mRNA transcribed from a marker gene may be determined.

[0117] The level of expression of specific marker genes can be accomplished by determining the amount of mRNA, or polynucleotides derived therefrom, present in a sample. Any method for determining RNA levels can be used. For example, RNA is isolated from a sample and separated on an agarose gel. The separated RNA is then transferred to a solid support, such as a filter. Nucleic acid probes representing one or more markers are then hybridized to the filter by northern hybridization, and the amount of marker-derived RNA is determined. Such determination can be visual, or machine-aided, for example, by use of a densitometer. Another method of determining RNA levels is by use of a dot-blot or a slot-blot. In this method, RNA, or nucleic acid derived therefrom, from a sample is labeled. The RNA or nucleic acid derived therefrom is then hybridized to a filter containing oligonucleotides derived from one or more marker genes, wherein the oligonucleotides are placed upon the filter at discrete, easily-identifiable locations. Hybridization, or lack thereof, of the labeled RNA to the filter-bound oligonucleotides is determined visually or by densitometer. Polynucleotides can be labeled using a radiolabel or a fluorescent (i.e., visible) label.

[0118] These examples are not intended to be limiting; other methods of determining RNA abundance are known in the art.

[0119] The level of expression of particular marker genes may also be assessed by determining the level of the specific protein expressed from the marker genes. This can be accomplished, for example, by separation of proteins from a sample on a polyacrylamide gel, followed by identification of specific marker-derived proteins using antibodies in a western blot. Alternatively, proteins can be separated by two-dimensional gel electrophoresis systems. Two-dimensional gel electrophoresis is well-known in the art and typically involves isoelectric focusing along a first dimension followed by SDS-PAGE electrophoresis along a second dimension. See, e.g., Hames et al, 1990, GEL ELECTROPHORESIS OF PROTEINS: A PRACTICAL APPROACH, IRL Press, New York; Shevchenko et al., Proc. Nat'l Acad. Sci. USA 93:1440-1445 (1996); Sagliocco et al., Yeast 12:1519-1533 (1996); Lander, Science 274:536-539 (1996). The resulting electropherograms can be analyzed by numerous techniques, including mass spectrometric techniques, western blotting and immunoblot analysis using polyclonal and monoclonal antibodies.

[0120] Alternatively, marker-derived protein levels can be determined by constructing an antibody microarray in which binding sites comprise immobilized, preferably monoclonal, antibodies specific to a plurality of protein species encoded by the cell genome. Preferably, antibodies are present for a substantial fraction of the marker-derived proteins of interest. Methods for making monoclonal antibodies are well known (see, e.g., Harlow and Lane, 1988, ANTIBODIES: A LABORATORY MANUAL, Cold Spring Harbor, N.Y., which is incorporated in its entirety for all purposes). In one embodiment, monoclonal antibodies are raised against synthetic peptide fragments designed based on genomic sequence of the cell. With such an antibody array, proteins from the cell are contacted to the array and their binding is assayed with assays known in the art. Generally, the expression, and the level of expression, of proteins of diagnostic or prognostic interest can be detected through immunohistochemical staining of tissue slices or sections.

[0121] Finally, expression of marker genes in a number of tissue specimens may be characterized using a “tissue array” (Kononen et al., Nat. Med 4(7):844-7 (1998)). In a tissue array, multiple tissue samples are assessed on the same microarray. The arrays allow in situ detection of RNA and protein levels; consecutive sections allow the analysis of multiple samples simultaneously.

### 5.4.2 Microarrays

[0122] In preferred embodiments, polynucleotide microarrays are used to measure expression so that the expression status of each of the markers above is assessed simultaneously. In a specific embodiment, the invention provides oligonucleotide or cDNA arrays comprising probes hybridizable to the genes corresponding to each of the marker sets described above (i.e., markers to distinguish patients 55 years and older with good prognosis versus patients with poor prognosis). In a more specific embodiment, the invention provides oligonucleotide arrays comprising probes having sequences identified by SEQ ID NOS: 388-774, corresponding respectively to markers identified by SEQ ID NOS: 1-387, or a subset or subsets of at least 10, 20, 30, 40, 50, 75, 100, 125, 150, 175 or 200 of these probes.

[0123] The microarrays provided by the present invention may comprise probes hybridizable to the genes corresponding to markers able to distinguish the status of one, two, or all three of the clinical conditions noted above. In particular, the invention provides polynucleotide arrays comprising probes to a subset or subsets of at least 10, 20, 30, 40, 50, 75, 100, 125, 150, 175 or 200 of the different markers for which genes are listed in any of Tables 1-8.

[0124] In specific embodiments, the invention provides polynucleotide arrays in which polynucleotide probes complementary and hybridizable to the breast cancer prognosis-related markers described herein are at least 50%, 60%, 70%, 80%, 85%, 90%, 95% or 98% of the probes on said array. In another specific embodiment, the microarray of the invention comprises probes to at least 10 genes selected from Table 1, Table 2, Table 3, Table 4, Table 5, Table 6, Table 7 or Table 8. In another specific embodiment, the microarray of the convention comprises probes complementary and hybridizable to 10%, 15%, 20%, 25%, 30%, 40%, 50%, 60%, 70%, 80%, or 90% of the genes listed in Table 1, Table 2, Table 3, Table 4, Table 5, Table 6, Table 7 or Table 8. Probes may be generated, of course, from the sequence of any of SEQ ID NOS: 1-387 for inclusion in a microarray of the invention. Preferably, a microarray of the invention comprises probes to all 200 genes listed in Tables 1 or 2; all 100 genes listed in Tables 3 or 4; all 200 genes listed in Tables 5 or 6; and/or all 100 genes listed in Tables 7 or 8. In another embodiment, the microarray of the invention comprises probes complementary and hybridizable to at least 10 of the genes listed in Tables 1-4, and probes complementary and hybridizable to at least 10 of the genes listed in Tables 5-8. The microarray may comprise probes complementary and hybridizable to 10%, 15%, 20%, 25%, 30%, 40%, 50%, 60%, 70%, 80%, or 90% of the different markers listed in any of Tables 1-8; that is, may comprise probes complementary and hybridizable to 10%, 15%, 20%, 25%, 30%, 40%, 50%, 60%, 70%, 80%, or 90% of the sequences of SEQ ID NOS:1-387.

[0125] In yet another specific embodiment, microarrays that are used in the methods disclosed herein optionally comprise markers additional to at least some of the different markers listed in Tables 1-8. For example, in a specific embodiment, the microarray is a screening or scanning array as described in Altschuler et al., International Publication WO 02/18646, published Mar. 7, 2002 and Scherer et al., International Publication WO 02/16650, published Feb. 28, 2002. The scanning and screening arrays comprise regularly-spaced, positionally-addressable probes derived from genomic nucleic acid sequence, both expressed and unexpressed. Such arrays may comprise probes corresponding to a subset of, or all of, the different markers listed in Tables 1-8, or a subset thereof as described above, and can be used to monitor marker expression in the same way as a microarray containing only markers listed in Tables 1-6.

[0126] In yet another specific embodiment, the microarray is a commercially-available cDNA microarray that comprises at least five of the different markers listed in Tables 1-8. Preferably, a commercially-available cDNA microarray comprises all of the markers listed in Tables 1-8. However, such a microarray may comprise 5, 10, 15, 25, 50, 100, 150, 200, 250 or more of the different markers in any of Tables 1-8, up to the total number of markers listed in Tables 1-8. In a specific embodiment of the microarrays used in the methods disclosed herein, the different markers that are all or a portion of Tables 1-8 are at least 50%, 60%, 70%, 80%, 90%, 95% or 98% of the probes on the microarray.

[0127] The microarray of the invention may additionally include sets of probes complementary and hybridizable to genes informative for related or unrelated conditions. For example, a microarray comprising probes complementary and hybridizable to a plurality of the different prognosis-informative genes listed in any or all of Tables 1-8 may additionally comprise probes complementary and hybridizable to genes informative for ER tumor status, genes that may be used to distinguish sporadic from BRCA-1 type tumors, or genes that are informative for any other clinical aspect of breast cancer, or any other related or unrelated condition.

[0128] General methods pertaining to the construction of microarrays comprising the marker sets and/or subsets above are described in the following sections.

### 5.4.2.1 Construction of Microarrays

[0129] Microarrays are prepared by selecting probes which comprise a polynucleotide sequence, and then immobilizing such probes to a solid support or surface. For example, the probes may comprise DNA sequences, RNA sequences, or copolymer sequences of DNA and RNA. The polynucleotide sequences of the probes may also comprise DNA and/or RNA analogues, or combinations thereof. For example, the polynucleotide sequences of the probes may be full or partial fragments of genomic DNA. The polynucleotide sequences of the probes may also be synthesized nucleotide sequences, such as synthetic oligonucleotide sequences. The probe sequences can be synthesized either enzymatically in vivo, enzymatically in vitro (e.g., by PCR), or non-enzymatically in vitro.

[0130] The probe or probes used in the methods of the invention are preferably immobilized to a solid support which may be either porous or non-porous. For example, the probes of the invention may be polynucleotide sequences which are attached to a nitrocellulose or nylon membrane or filter covalently at either the 3′ or the 5′ end of the polynucleotide. Such hybridization probes are well known in the art (see, e.g., Sambrook et al., MOLECULAR CLONING—A LABORATORY MANUAL (2ND ED.), Vols. 1-3, Cold Spring Harbor Laboratory, Cold Spring Harbor, N.Y. (1989). Alternatively, the solid support or surface may be a glass or plastic surface. In a particularly preferred embodiment, hybridization levels are measured to microarrays of probes consisting of a solid phase on the surface of which are immobilized a population of polynucleotides, such as a population of DNA or DNA mimics, or, alternatively, a population of RNA or RNA mimics. The solid phase may be a nonporous or, optionally, a porous material such as a gel.

[0131] In preferred embodiments, a microarray comprises a support or surface with an ordered array of binding (e.g., hybridization) sites or “probes” each representing one of the markers described herein. Preferably the microarrays are addressable arrays, and more preferably positionally addressable arrays. More specifically, each probe of the array is preferably located at a known, predetermined position on the solid support such that the identity (i.e., the sequence) of each probe can be determined from its position in the array (i.e., on the support or surface). In preferred embodiments, each probe is covalently attached to the solid support at a single site.

[0132] Microarrays can be made in a number of ways, of which several are described below. However produced, microarrays share certain characteristics. The arrays are reproducible, allowing multiple copies of a given array to be produced and easily compared with each other. Preferably, microarrays are made from materials that are stable under binding (e.g., nucleic acid hybridization) conditions. The microarrays are preferably small, e.g., between 1 cm² and 25 cm², between 12 cm² and 13 cm², or 3 cm². However, larger arrays are also contemplated and may be preferable, e.g., for use in screening arrays. Preferably, a given binding site or unique set of binding sites in the microarray will specifically bind (e.g., hybridize) to the product of a single gene in a cell (e.g., to a specific mRNA, or to a specific cDNA derived therefrom). However, in general, other related or similar sequences will cross hybridize to a given binding site.

[0133] The microarrays of the present invention include one or more test probes, each of which has a polynucleotide sequence that is complementary to a subsequence of RNA or DNA to be detected. Preferably, the position of each probe on the solid surface is known. Indeed, the microarrays are preferably positionally addressable arrays. Specifically, each probe of the array is preferably located at a known, predetermined position on the solid support such that the identity (i.e., the sequence) of each probe can be determined from its position on the array (i.e., on the support or surface).

[0134] According to the invention, the microarray is an array (i.e., a matrix) in which each position represents one of the markers described herein. For example, each position can contain a DNA or DNA analogue based on genomic DNA to which a particular RNA or cDNA transcribed from that genetic marker can specifically hybridize. The DNA or DNA analogue can be, e.g., a synthetic oligomer or a gene fragment. In one embodiment, probes representing each of the markers is present on the array. In a preferred embodiment, the array comprises the 550 of the 2,460 RE-status markers, 70 of the BRCA1/sporadic markers, and all 231 of the prognosis markers.

### 5.4.2.2 Preparing Probes for Microarrays

[0135] As noted above, the “probe” to which a particular polynucleotide molecule specifically hybridizes according to the invention contains a complementary genomic polynucleotide sequence. The probes of the microarray preferably consist of nucleotide sequences of no more than 1,000 nucleotides. In some embodiments, the probes of the array consist of nucleotide sequences of 10 to 1,000 nucleotides. In a preferred embodiment, the nucleotide sequences of the probes are in the range of 10-200 nucleotides in length and are genomic sequences of a species of organism, such that a plurality of different probes is present, with sequences complementary and thus capable of hybridizing to the genome of such a species of organism, sequentially tiled across all or a portion of such genome. In other specific embodiments, the probes are in the range of 10-30 nucleotides in length, in the range of 10-40 nucleotides in length, in the range of 20-50 nucleotides in length, in the range of 40-80 nucleotides in length, in the range of 50-150 nucleotides in length, in the range of 80-120 nucleotides in length, and most preferably are 60 nucleotides in length.

[0136] The probes may comprise DNA or DNA “mimics” (e.g., derivatives and analogues) corresponding to a portion of an organism's genome. In another embodiment, the probes of the microarray are complementary RNA or RNA mimics. DNA mimics are polymers composed of subunits capable of specific, Watson-Crick-like hybridization with DNA, or of specific hybridization with RNA. The nucleic acids can be modified at the base moiety, at the sugar moiety, or at the phosphate backbone. Exemplary DNA mimics include, e.g., phosphorothioates.

[0137] DNA can be obtained, e.g., by polymerase chain reaction (PCR) amplification of genomic DNA or cloned sequences. PCR primers are preferably chosen based on a known sequence of the genome that will result in amplification of specific fragments of genomic DNA. Computer programs that are well known in the art are useful in the design of primers with the required specificity and optimal amplification properties, such as Oligo version 5.0 (National Biosciences). Typically each probe on the microarray will be between 10 bases and 50,000 bases, usually between 300 bases and 1,000 bases in length. PCR methods are well known in the art, and are described, for example, in Innis et al., eds., PCR PROROCOLS: A GUIDE TO METHODS AND APPLICATIONS, Academic Press Inc., San Diego, Calif. (1990). It will be apparent to one skilled in the art that controlled robotic systems are useful for isolating and amplifying nucleic acids.

[0138] An alternative, preferred means for generating the polynucleotide probes of the microarray is by synthesis of synthetic polynucleotides or oligonucleotides, e.g., using N-phosphonate or phosphoramidite chemistries (Froehler et al., Nucleic Acid Res. 14:5399-5407 (1986); McBride et al., Tetrahedron Lett. 24:246-248 (1983)). Synthetic sequences are typically between about 10 and about 500 bases in length, more typically between about 20 and about 100 bases, and most preferably between about 40 and about 70 bases in length. In some embodiments, synthetic nucleic acids include non-natural bases, such as, but by no means limited to, inosine. As noted above, nucleic acid analogues may be used as binding sites for hybridization. An example of a suitable nucleic acid analogue is peptide nucleic acid (see, e.g., Egholm et al., Nature 363:566-568 (1993); U.S. Pat. No. 5,539,083).

[0139] Probes are preferably selected using an algorithm that takes into account binding energies, base composition, sequence complexity, cross-hybridization binding energies, and secondary structure (see Friend et al., International Patent Publication WO 01/05935, published Jan. 25, 2001; Hughes et al., Nat. Biotech. 19:342-7 (2001)).

[0140] A skilled artisan will also appreciate that positive control probes, e.g., probes known to be complementary and hybridizable to sequences in the target polynucleotide molecules, and negative control probes, e.g., probes known to not be complementary and hybridizable to sequences in the target polynucleotide molecules, should be included on the array. In one embodiment, positive controls are synthesized along the perimeter of the array. In another embodiment, positive controls are synthesized in diagonal stripes across the array. In still another embodiment, the reverse complement for each probe is synthesized next to the position of the probe to serve as a negative control. In yet another embodiment, sequences from other species of organism are used as negative controls or as “spike-in” controls.

### 5.4.2.3 Attaching Probes to the Solid Surface

[0141] The probes are attached to a solid support or surface, which may be made, e.g., from glass, plastic (e.g., polypropylene, nylon), polyacrylamide, nitrocellulose, gel, or other porous or nonporous material. A preferred method for attaching the nucleic acids to a surface is by printing on glass plates, as is described generally by Schena et al, Science 270:467-470 (1995). This method is especially useful for preparing microarrays of cDNA (See also, DeRisi et al, Nature Genetics 14:457-460 (1996); Shalon et al., Genome Res. 6:639-645 (1996); and Schena et al., Proc. Natl. Acad. Sci. U.S.A 93:10539-11286 (1995)).

[0142] A second preferred method for making microarrays is by making high-density oligonucleotide arrays. Techniques are known for producing arrays containing thousands of oligonucleotides complementary to defined sequences, at defined locations on a surface using photolithographic techniques for synthesis in situ (see, Fodor et al., 1991, Science 251:767-773; Pease et al., 1994, Proc. Natl. Acad. Sci. U.S.A. 91:5022-5026; Lockhart et al., 1996, Nature Biotechnology 14:1675; U.S. Pat. Nos. 5,578,832; 5,556,752; and 5,510,270) or other methods for rapid synthesis and deposition of defined oligonucleotides (Blanchard et al., Biosensors & Bioelectronics 11:687-690). When these methods are used, oligonucleotides (e.g., 60-mers) of known sequence are synthesized directly on a surface such as a derivatized glass slide. Usually, the array produced is redundant, with several oligonucleotide molecules per RNA.

[0143] Other methods for making microarrays, e.g., by masking (Maskos and Southern, 1992, Nuc. Acids. Res. 20:1679-1684), may also be used. In principle, and as noted supra, any type of array, for example, dot blots on a nylon hybridization membrane (see Sambrook et al., MOLECULAR CLONING—A LABORATORY MANUAL (2ND ED.), Vols. 1-3, Cold Spring Harbor Laboratory, Cold Spring Harbor, N.Y. (1989)) could be used. However, as will be recognized by those skilled in the art, very small arrays will frequently be preferred because hybridization volumes will be smaller.

[0144] In one embodiment, the arrays of the present invention are prepared by synthesizing polynucleotide probes on a support. In such an embodiment, polynucleotide probes are attached to the support covalently at either the 3′ or the 5′ end of the polynucleotide.

[0145] In a particularly preferred embodiment, microarrays of the invention are manufactured by means of an ink jet printing device for oligonucleotide synthesis, e.g., using the methods and systems described by Blanchard in U.S. Pat. No. 6,028,189; Blanchard et al., 1996, Biosensors and Bioelectronics 11:687-690; Blanchard, 1998, in SYNTHETIC DNA ARRAYS IN GENETIC ENGINEERING, Vol. 20, J. K. Setlow, Ed., Plenum Press, New York at pages 111-123. Specifically, the oligonucleotide probes in such microarrays are preferably synthesized in arrays, e.g., on a glass slide, by serially depositing individual nucleotide bases in “microdroplets” of a high surface tension solvent such as propylene carbonate. The microdroplets have small volumes (e.g., 100 pL or less, more preferably 50 pL or less) and are separated from each other on the microarray (e.g., by hydrophobic domains) to form circular surface tension wells which define the locations of the array elements (i.e., the different probes). Microarrays manufactured by this ink-jet method are typically of high density, preferably having a density of at least about 2,500 different probes per 1 cm². The polynucleotide probes are attached to the support covalently at either the 3′ or the 5′ end of the polynucleotide.

### 5.4.2.4 Target Polynucleotide Molecules

[0146] The polynucleotide molecules which may be analyzed by the present invention (the “target polynucleotide molecules”) may be from any clinically relevant source, but are expressed RNA or a nucleic acid derived therefrom (e.g., cDNA or amplified RNA derived from cDNA that incorporates an RNA polymerase promoter), including naturally occurring nucleic acid molecules, as well as synthetic nucleic acid molecules. In one embodiment, the target polynucleotide molecules comprise RNA, including, but by no means limited to, total cellular RNA, poly(A)⁺ messenger RNA (mRNA) or fraction thereof, cytoplasmic mRNA, or RNA transcribed from cDNA (i.e., cRNA; see, e.g., Linsley & Schelter, U.S. patent application Ser. No. 09/411,074, filed Oct. 4, 1999, or U.S. Pat. No. 5,545,522, 5,891,636, or 5,716,785). Methods for preparing total and poly(A)⁺ RNA are well known in the art, and are described generally, e.g., in Sambrook et al., MOLECULAR CLONING—A LABORATORY MANUAL (2ND ED.), Vols. 1-3, Cold Spring Harbor Laboratory, Cold Spring Harbor, N.Y. (1989). In one embodiment, RNA is extracted from cells of the various types of interest in this invention using guanidinium thiocyanate lysis followed by CsCl centrifugation (Chirgwin et al., 1979, Biochemistry 18:5294-5299). In another embodiment, total RNA is extracted using a silica gel-based column, commercially available examples of which include RNeasy (Qiagen, Valencia, Calif.) and StrataPrep (Stratagene, La Jolla, Calif.). In an alternative embodiment, which is preferred for S. cerevisiae, RNA is extracted from cells using phenol and chloroform, as described in Ausubel et al., eds., 1989, CURRENT PROTOCOLS IN MOLECULAR BIOLOGY, Vol III, Green Publishing Associates, Inc., John Wiley & Sons, Inc., New York, at pp. 13.12.1-13.12.5). Poly(A)⁺ RNA can be selected, e.g., by selection with oligo-dT cellulose or, alternatively, by oligo-dT primed reverse transcription of total cellular RNA. In one embodiment, RNA can be fragmented by methods known in the art, e.g., by incubation with ZnCl₂, to generate fragments of RNA. In another embodiment, the polynucleotide molecules analyzed by the invention comprise cDNA, or PCR products of amplified RNA or cDNA.

[0147] In one embodiment, total RNA, mRNA, or nucleic acids derived therefrom, is isolated from a sample taken from a person having breast cancer. Target polynucleotide molecules that are poorly expressed in particular cells may be enriched using normalization techniques (Bonaldo et al., 1996, Genome Res. 6:791-806).

[0148] As described above, the target polynucleotides are detectably labeled at one or more nucleotides. Any method known in the art may be used to detectably label the target polynucleotides. Preferably, this labeling incorporates the label uniformly along the length of the RNA, and more preferably, the labeling is carried out at a high degree of efficiency. One embodiment for this labeling uses oligo-dT primed reverse transcription to incorporate the label; however, conventional methods of this method are biased toward generating 3′ end fragments. Thus, in a preferred embodiment, random primers (e.g., 9-mers) are used in reverse transcription to uniformly incorporate labeled nucleotides over the full length of the target polynucleotides. Alternatively, random primers may be used in conjunction with PCR methods or 17 promoter-based in vitro transcription methods in order to amplify the target polynucleotides.

[0149] In a preferred embodiment, the detectable label is a luminescent label. For example, fluorescent labels, bioluminescent labels, chemiluminescent labels, and calorimetric labels may be used in the present invention. In a highly preferred embodiment, the label is a fluorescent label, such as a fluorescein, a phosphor, a rhodamine, or a polymethine dye derivative. Examples of commercially available fluorescent labels include, for example, fluorescent phosphoramidites such as FluorePrine (Amersham Pharmacia, Piscataway, N.J.), Fluoredite (Millipore, Bedford, Mass.), FAM (ABI, Foster City, Calif.), and Cy3 or Cy5 (Amersham Pharmacia, Piscataway, N.J.). In another embodiment, the detectable label is a radiolabeled nucleotide.

[0150] In a further preferred embodiment, target polynucleotide molecules from a patient sample are labeled differentially from target polynucleotide molecules of a standard. The standard can comprise target polynucleotide molecules from normal individuals (i.e., those not having breast cancer). In a highly preferred embodiment, the standard comprises target polynucleotide molecules pooled from samples from normal individuals or tumor samples from individuals having sporadic-type breast tumors. In another embodiment, the target polynucleotide molecules are derived from the same individual, but are taken at different time points, and thus indicate the efficacy of a treatment by a change in expression of the markers, or lack thereof, during and after the course of treatment (i.e., chemotherapy, radiation therapy or cryotherapy), wherein a change in the expression of the markers from a poor prognosis pattern to a good prognosis pattern indicates that the treatment is efficacious. In this embodiment, different timepoints are differentially labeled.

### 5.4.2.5 Hybridization to Microarrays

[0151] Nucleic acid hybridization and wash conditions are chosen so that the target polynucleotide molecules specifically bind or specifically hybridize to the complementary polynucleotide sequences of the array, preferably to a specific array site, wherein its complementary DNA is located.

[0152] Arrays containing double-stranded probe DNA situated thereon are preferably subjected to denaturing conditions to render the DNA single-stranded prior to contacting with the target polynucleotide molecules. Arrays containing single-stranded probe DNA (e.g., synthetic oligodeoxyribonucleic acids) may need to be denatured prior to contacting with the target polynucleotide molecules, e.g., to remove hairpins or dimers which form due to self complementary sequences.

[0153] Optimal hybridization conditions will depend on the length (e.g., oligomer versus polynucleotide greater than 200 bases) and type (e.g., RNA, or DNA) of probe and target nucleic acids. One of skill in the art will appreciate that as the oligonucleotides become shorter, it may become necessary to adjust their length to achieve a relatively uniform melting temperature for satisfactory hybridization results. General parameters for specific (i.e., stringent) hybridization conditions for nucleic acids are described in Sambrook et al., MOLECULAR CLONING—A LABORATORY MANUAL (2ND ED.), Vols. 1-3, Cold Spring Harbor Laboratory, Cold Spring Harbor, N.Y. (1989), and in Ausubel et al., CURRENT PROTOCOLS IN MOLECULAR BIOLOGY, vol. 2, Current Protocols Publishing, New York (1994). Typical hybridization conditions for the cDNA microarrays of Schena et al. are hybridization in 5×SSC plus 0.2% SDS at 65° C. for four hours, followed by washes at 25° C. in low stringency wash buffer (1×SSC plus 0.2% SDS), followed by 10 minutes at 25° C. in higher stringency wash buffer (0.1×SSC plus 0.2% SDS) (Schena et al., Proc. Natl. Acad. Sci. U.S.A 93:10614 (1993)). Useful hybridization conditions are also provided in, e.g., Tijessen, 1993, HYBRIDIZATION WITH NUCLEIC ACID PROBES, Elsevier Science Publishers B.V.; and Kricka, 1992, NONISOTOPIC DNA PROBE TECHNIQUES, Academic Press, San Diego, Calif.

[0154] Particularly preferred hybridization conditions include hybridization at a temperature at or near the mean melting temperature of the probes (e.g., within 5° C., more preferably within 2° C.) in 1 M NaCl, 50 mM MES buffer (pH 6.5), 0.5% sodium sarcosine and 30% formamide.

### 5.4.2.6 Signal Detection and Data Analysis

[0155] When fluorescently labeled probes are used, the fluorescence emissions at each site of a microarray may be, preferably, detected by scanning confocal laser microscopy. In one embodiment, a separate scan, using the appropriate excitation line, is carried out for each of the two fluorophores used. Alternatively, a laser may be used that allows simultaneous specimen illumination at wavelengths specific to the two fluorophores and emissions from the two fluorophores can be analyzed simultaneously (see Shalon et al., 1996, “A DNA microarray system for analyzing complex DNA samples using two-color fluorescent probe hybridization,” Genome Research 6:639-645, which is incorporated by reference in its entirety for all purposes). In a preferred embodiment, the arrays are scanned with a laser fluorescent scanner with a computer controlled X-Y stage and a microscope objective. Sequential excitation of the two fluorophores is achieved with a multi-line, mixed gas laser and the emitted light is split by wavelength and detected with two photomultiplier tubes. Fluorescence laser scanning devices are described in Schena et al., Genome Res. 6:639-645 (1996), and in other references cited herein. Alternatively, the fiber-optic bundle described by Ferguson et al., Nature Biotech 14:1681-1684 (1996), may be used to monitor mRNA abundance levels at a large number of sites simultaneously.

[0156] Signals are recorded and, in a preferred embodiment, analyzed by computer, e.g., using a 12 or 16 bit analog to digital board. In one embodiment the scanned image is despeckled using a graphics program (e.g., Hijaak Graphics Suite) and then analyzed using an image gridding program that creates a spreadsheet of the average hybridization at each wavelength at each site. If necessary, an experimentally determined correction for “cross talk” (or overlap) between the channels for the two fluors may be made. For any particular hybridization site on the transcript array, a ratio of the emission of the two fluorophores can be calculated. The ratio is independent of the absolute expression level of the cognate gene, but is useful for genes whose expression is significantly modulated in association with the different breast cancer-related condition.

### 5.4.2.7. Expression Profiling Using RT-PCR

[0157] Quantitative reverse transcriptase PCR (qRT-PCR) can also be used to determine the expression level of a marker gene. The first step in gene expression profiling by RT-PCR is the reverse transcription of the RNA template into cDNA, followed by its exponential amplification in a PCR reaction. The two most commonly used reverse transcriptases are avilo myeloblastosis virus reverse transcriptase (AMV-RT) and Moloney murine leukemia virus reverse transcriptase (MLV-RT). The reverse transcription step is typically primed using specific primers, random hexamers, or oligo-dT primers, depending on the circumstances and the goal of expression profiling. For example, extracted RNA can be reverse-transcribed using a GeneAmp RNA PCR kit (Perkin Elmer, Calif., USA), following the manufacturer's instructions. The derived cDNA can then be used as a template in the subsequent PCR reaction.

[0158] Although the PCR step can use a variety of thermostable DNA-dependent DNA polymerases, it typically employs the Taq DNA polymerase, which has a 5′-3′ nuclease activity but lacks a 3′-5′ proofreading endonuclease activity. Thus, TaqMan® PCR typically utilizes the 5′-nuclease activity of Taq or Tth polymerase to hydrolyze a hybridization probe bound to its target amplicon, but any enzyme with equivalent 5′ nuclease activity can be used. Two oligonucleotide primers are used to generate an amplicon typical of a PCR reaction. A third oligonucleotide, or probe, is designed to detect nucleotide sequence located between the two PCR primers. The probe is non-extendible by Taq DNA polymerase enzyme, and is labeled with a reporter fluorescent dye and a quencher fluorescent dye. Any laser-induced emission from the reporter dye is quenched by the quenching dye when the two dyes are located close together as they are on the probe. During the amplification reaction, the Taq DNA polymerase enzyme cleaves the probe in a template-dependent manner. The resultant probe fragments disassociate in solution, and signal from the released reporter dye is free from the quenching effect of the second fluorophore. One molecule of reporter dye is liberated for each new molecule synthesized, and detection of the unquenched reporter dye provides the basis for quantitative interpretation of the data.

[0159] TaqMan® RT-PCR can be performed using commercially available equipment, such as, for example, ABI PRISM 7700™. Sequence Detection System™ (Perkin-Elmer-Applied Biosystems, Foster City, Calif., USA), or Lightcycler (Roche Molecular Biochemicals, Mannheim, Germany). In a preferred embodiment, the 5′ nuclease procedure is run on a real-time quantitative PCR device such as the ABI PRISM 770™ Sequence Detection System™. The system consists of a thermocycler, laser, charge-coupled device (CCD), camera and computer. The system includes software for running the instrument and for analyzing the data.

[0160] 5′-Nuclease assay data are initially expressed as Ct, or the threshold cycle. Fluorescence values are recorded during every cycle and represent the amount of product amplified to that point in the amplification reaction. The point when the fluorescent signal is first recorded as statistically significant is the threshold cycle (Ct).

[0161] To minimize errors and the effect of sample-to-sample variation, RT-PCR is usually performed using an internal standard. The ideal internal standard is expressed at a constant level among different tissues, and is unaffected by the experimental treatment. RNAs most frequently used to normalize patterns of gene expression are mRNAs for the housekeeping genes glyceraldehyde-3-phosphate-dehydrogenase (GAPDH) and β-actin.

[0162] A more recent variation of the RT-PCR technique is the real time quantitative PCR, which measures PCR product accumulation through a dual-labeled fluorigenic probe (i.e., TaqMan® probe). Real time PCR is compatible both with quantitative competitive PCR, where internal competitor for each target sequence is used for normalization, and with quantitative comparative PCR using a normalization gene contained within the sample, or a housekeeping gene for RT-PCR. For further details see, e.g. Held et al., Genome Research 6:986-994 (1996).

### 5.5 Computer-Facilitated Analysis

[0163] The present invention further provides for kits comprising the marker sets above. In a preferred embodiment, the kit contains a microarray ready for hybridization to target polynucleotide molecules, plus software for the data analyses described above.

[0164] The analytic methods described in the previous sections can be implemented by use of the following computer systems and according to the following programs and methods. A computer system comprises internal components linked to external components. The internal components of a typical computer system include a processor element interconnected with a main memory. For example, the computer system can be an Intel 8086-, 80386-, 80486-, Pentium™, or Pentium™-based processor with preferably 32 MB or more of main memory. The computer system may also be a Macintosh or a Macintosh-based system, but may also be a minicomputer or mainframe.

[0165] The external components may include mass storage. This mass storage can be one or more hard disks (which are typically packaged together with the processor and memory). Such hard disks are preferably of 1 GB or greater storage capacity. Other external components include a user interface device, which can be a monitor, together with an inputting device, which can be a “mouse”, or other graphic input devices, and/or a keyboard. A printing device can also be attached to the computer.

[0166] Typically, a computer system is also linked to network link, which can be part of an Ethernet link to other local computer systems, remote computer systems, or wide area communication networks, such as the Internet. This network link allows the computer system to share data and processing tasks with other computer systems.

[0167] Loaded into memory during operation of this system are several software components, which are both standard in the art and special to the instant invention. These software components collectively cause the computer system to function according to the methods of this invention. These software components are typically stored on the mass storage device. A software component comprises the operating system, which is responsible for managing computer system and its network interconnections. This operating system can be, for example, of the Microsoft Windows® family, such as Windows 3.1, Windows 95, Windows 98, Windows 2000, or Windows NT, or may be of the Macintosh OS family, or may be UNIX or an operating system specific to a minicomputer or mainframe. The software component represents common languages and functions conveniently present on this system to assist programs implementing the methods specific to this invention. Many high or low level computer languages can be used to program the analytic methods of this invention. Instructions can be interpreted during run-time or compiled. Preferred languages include C/C++, FORTRAN and JAVA. Most preferably, the methods of this invention are programmed in mathematical software packages that allow symbolic entry of equations and high-level specification of processing, including some or all of the algorithms to be used, thereby freeing a user of the need to procedurally program individual equations or algorithms. Such packages include Mathlab from Mathworks (Natick, Mass.), Mathematica® from Wolfram Research (Champaign, Ill.), or S-Plus® from Math Soft (Cambridge, Mass.). Specifically, the software component includes the analytic methods of the invention as programmed in a procedural language or symbolic package.

[0168] The software to be included with the kit comprises the data analysis methods of the invention as disclosed herein. In particular, the software may include mathematical routines for marker discovery, including the calculation of similarity values between clinical categories (e.g., ER status) and marker expression. The software may also include mathematical routines for calculating the similarity between sample marker expression and control marker expression, using array-generated fluorescence data, to determine the clinical classification of a sample.

[0169] Additionally, the software may also include mathematical routines for determining the prognostic outcome, and recommended therapeutic regimen, for a particular breast cancer patient. Such software would include instructions for the computer system's processor to receive data structures that include the level of expression of ten or more of the different marker genes listed in any of Tables 1-8 in a breast cancer tumor sample obtained from the breast cancer patient; the mean level of expression of the same genes in a control or template; and the breast cancer patient's clinical information, for example including lymph node and ER status. The software may additionally include mathematical routines for transforming the hybridization data and for calculating the similarity between the expression levels for the marker genes in the patient's breast cancer tumor sample and the control or template. In a specific embodiment, the software includes mathematical routines for calculating a similarity metric, such as a coefficient of correlation, representing the similarity between the expression levels for the marker genes in the patient's breast cancer tumor sample and the control or template, and expressing the similarity as that similarity metric.

[0170] The software may include decisional routines that integrate the patient's clinical and marker gene expression data, and recommend a course of therapy. In one embodiment, for example, the software causes the processor unit to receive expression data for the patient's tumor sample, calculate a metric of similarity of these expression values to the values for the same genes in a template or control, compare this similarity metric to a pre-selected similarity metric threshold or thresholds that differentiate prognostic groups, assign the patient to the prognostic group, and, on the basis of the prognostic group, assign a recommended therapeutic regimen. In a specific example, the software additionally causes the processor unit to receive data structures comprising clinical information about the breast cancer patient. In a more specific example, such clinical information includes the patient's age, stage of breast cancer, estrogen receptor status, and lymph node status.

[0171] Where the control is an expression template comprising expression values for marker genes within a group of breast cancer patients, the control can comprise either hybridization data obtained at the same time (i.e., in the same hybridization experiment) as the patient's individual hybridization data, or can be a set of hybridization or marker expression values stores on a computer, or on computer-readable media. If the latter is used, new patient hybridization data for the selected marker genes, obtained from initial or follow-up tumor samples, or suspected tumor samples, can be compared to the stored values for the same genes without the need for additional control hybridizations. However, the software may additionally comprise routines for updating the control data set, i.e., to add information from additional breast cancer patients or to remove existing members of the control data set, and, consequently, for recalculating the average expression level values that comprise the template. In another specific embodiment, said control comprises a set of single-channel mean hybridization intensity values for each of said at least ten of said genes, stored on a computer-readable medium.

[0172] Clinical data relating to a breast cancer patient, and used by the computer program products of the invention, can be contained in a database of clinical data in which information on each patient is maintained in a separate record, which record may contain any information relevant to the patient, the patient's medical history, treatment, prognosis, or participation in a clinical trial or study, including expression profile data generated as part of an initial diagnosis or for tracking the progress of the breast cancer during treatment.

[0173] Thus, one embodiment of the invention provides a computer program product for classifying a breast cancer patient according to prognosis, the computer program product for use in conjunction with a computer having a memory and a processor, the computer program product comprising a computer readable storage medium having a computer program mechanism encoded thereon, wherein said computer program product can be loaded into the one or more memory units of a computer and causes the one or more processor units of the computer to execute the steps of (a) receiving a first data structure comprising the level of expression of at least ten of the different genes for which markers are listed in any of Tables 1-8 in a cell sample taken from said breast cancer patient; (b) determining the similarity of the level of expression of said at least 10 genes to control levels of expression of said at least five genes to obtain a patient similarity value; (c) comparing said patient similarity value to selected first and second threshold values of similarity of said level of expression of said genes to said control levels of expression to obtain first and second similarity threshold values, respectively, wherein said second similarity threshold indicates greater similarity to said control levels of expression than does said first similarity threshold; and (d) classifying said breast cancer patient as having a first prognosis if said patient similarity value exceeds said first and said second threshold similarity values, a second prognosis if said patient similarity value exceeds said first threshold similarity value but does not exceed said second threshold similarity value, and a third prognosis if said patient similarity value does not exceed said first threshold similarity value or said second threshold similarity value. In a specific embodiment of said computer program product, said first threshold value of similarity and said second threshold value of similarity are values stored in said computer. In another more specific embodiment, said first prognosis is a “very good prognosis,” said second prognosis is an “intermediate prognosis,” and said third prognosis is a “poor prognosis,” and wherein said computer program mechanism may be loaded into the memory and further cause said one or more processor units of said computer to execute the step of assigning said breast cancer patient a therapeutic regimen comprising no adjuvant chemotherapy if the patient is lymph node negative and is classified as having a good prognosis or an intermediate prognosis, or comprising chemotherapy if said patient has any other combination of lymph node status and expression profile. In another specific embodiment, said computer program mechanism may be loaded into the memory and further cause said one or more processor units of the computer to execute the steps of receiving a data structure comprising clinical data specific to said breast cancer patient. In a more specific embodiment, said clinical data includes the lymph node and estrogen receptor (ER) status of said breast cancer patient. In more specific embodiment, said single-channel hybridization intensity values are log transformed. The computer implementation of the method, however, may use any desired transformation method. In another specific embodiment, the computer program product causes said processing unit to perform said comparing step (c) by calculating the difference between the level of expression of each of said genes in said cell sample taken from said breast cancer patient and the level of expression of the same genes in said control. In another specific embodiment, the computer program product causes said processing unit to perform said comparing step (c) by calculating the mean log level of expression of each of said genes in said control to obtain a control mean log expression level for each gene, calculating the log expression level for each of said genes in a breast cancer sample from said breast cancer patient to obtain a patient log expression level, and calculating the difference between the patient log expression level and the control mean log expression for each of said genes. In another specific embodiment, the computer program product causes said processing unit to perform said comparing step (c) by calculating similarity between the level of expression of each of said genes in said cell sample taken from said breast cancer patient and the level of expression of the same genes in said control, wherein said similarity is expressed as a similarity value. In more specific embodiment, said similarity value is a correlation coefficient. The similarity value may, however, be expressed as any art-known similarity metric.

[0174] In an exemplary implementation, to practice the methods of the present invention, a user first loads experimental data into the computer system. These data can be directly entered by the user from a monitor, keyboard, or from other computer systems linked by a network connection, or on removable storage media such as a CD-ROM, floppy disk (not illustrated), tape drive (not illustrated), ZIP® drive (not illustrated) or through the network. Next the user causes execution of expression profile analysis software which performs the methods of the present invention.

[0175] In another exemplary implementation, a user first loads experimental data and/or databases into the computer system. This data is loaded into the memory from the storage media or from a remote computer, preferably from a dynamic geneset database system, through the network. Next the user causes execution of software that performs the steps of the present invention.

[0176] Additionally, because the data obtained and analyzed in the software and computer system products of the invention are confidential, the software and/or computer system comprises access controls or access control routines, such as encryption, password-controlled access, and the like.

[0177] Alternative computer systems and software for implementing the analytic methods of this invention will be apparent to one of skill in the art and are intended to be comprehended within the accompanying claims. In particular, the accompanying claims are intended to include the alternative program structures for implementing the methods of this invention that will be readily apparent to one of skill in the art.

### 6. EXAMPLES

### Example 1

### Identification of Prognosis-Relevant Markers

[0178] A. Materials and Experimental Methods

[0179] 153 tumor samples were collected from breast cancer patients, each of whom was at least 55 years of age. Of the 153 patients, 45 had metastasis and 108 had no metastasis. RNA samples from each patient were prepared, and each RNA sample was profiled using inkjet microarrays. Marker genes were then identified based on expression patterns, and classifiers were trained to use these marker genes to classify tumors into prognostic categories. These marker genes were then used to predict the prognostic outcome.

[0180] Amplification, Labeling, and Hybridization

[0181] Total RNA was extracted from flash-frozen biopsy tumor specimens from each of the 153 breast cancer patients by using RNeasy columns (Qiagen). 5 μg total RNA was used as input for cRNA synthesis. An oligo-dT primer containing a T7 RNA polymerase promoter sequence was used to prime first strand cDNA synthesis, and random primers (pdN6) were used to prime second strand cDNA synthesis by MMLV Reverse Transcriptase. This reaction yielded a double-stranded cDNA that contained the T7 RNA polymerase (M7RNAP) promoter. The double-stranded cDNA was then transcribed into cRNA by T7RNAP. cRNA was labeled with Cy3 or Cy5 dyes using a two-step process. First, allylamine-derivitized nucleotides were enzymatically incorporated into cRNA products. For cRNA labeling, a 3:1 mixture of 5-(3-Aminoallyl)uridine 5′-triphosphate (Sigma) and UTP was substituted for UTP in the in vitro transcription (IVT) reaction. Allylamine-derivitized cRNA products were then reacted with N-hydroxy succinimide esters of Cy3 or Cy5 (CyDye, Amersham Pharmacia Biotech). 5 μg Cy5-labeled cRNA from one breast cancer patient were mixed with the same amount of Cy3-labeled product from the pool of equal amount of cRNA from each individual sporadic patient. Hybridizations were done in duplicate with fluor reversals. Before hybridization, labeled cRNAs were fragmented to an average size of approximately 50-100 nucleotides by heating at 60° C. in the presence of 10 mM ZnCl₂. Fragmented cRNAs were added to hybridization buffer containing 1 M NaCl, 0.5% sodium sarcosine and 50 mM MES, pH 6.5, which stringency was regulated by the addition of formamide to a final concentration of 30%. Hybridizations were carried out in a final volume of 3 ml at 40° C. on a rotating platform in a hybridization oven (Robbins Scientific). After hybridization, slides were washed and scanned using a confocal laser scanner (Agilent Technologies). Fluorescence intensities on scanned images were quantified, normalized and corrected.

[0182] Pooling of Samples

[0183] The reference cRNA pool was formed by pooling equal amount of cRNAs from each individual patient.

[0184] 25 k Human Microarray and Hybridization

[0185] Hybridizations were carried out in duplicate, the second time after fluorescent dye reversals. Before hybridization, labeled cRNAs were fragmented to an average size of approximately 50-100 nucleotides by heating at 60° C. in the presence of 10 mM ZnCl₂. Fragmented cRNAs were added to hybridization buffer containing 1 M NaCl, 0.5% sodium sarcosine and 50 mM MES, pH 6.5, and hybridization stringency was regulated by the addition of formamide to a final concentration of 30%. Hybridizations were carried out in a final volume of 3 ml at 40° C. on a rotating platform in a hybridization oven (Robbins Scientific). Hu25K microarrays represented the 24479 biological oligonucleotides plus 1281 control probes were used for this study. Sequences for microarrays were selected from RefSeq (a collection of non-redundant mRNA sequences, www.ncbi.nlm.nih.gov/LocusLink/refseq.html) and Phil Green EST contigs. Each mRNA or EST contig was represented on the Hu25K microarray by a single 60-mer oligonucleotide chosen by an oligo probe design program. After hybridization, slides were washed and scanned using a confocal laser scanner (Agilent Technologies). Fluorescence intensities on scanned images were quantified, normalized and corrected. Intensity ratios relative to the reference pool were calculated and the significance of the differential regulation was estimated by the error model developed for the transcript ratio measurements with two-color-labeled hybridization microarray system.

[0186] Analytic Methods and Primary Results

[0187] The methodological invention consists of four parts. The first part is the overview of the gene expression patterns from all 153 tumors from patient group of >55 year by two-dimensional unsupervised clustering to identify the dominant tumor types. The second part focuses on evaluating the 70-gene based classifier in the age group >55 years to test whether there is a prognostic profile that are universally valid across age groups (<55 year and >55 year) for breast cancer. In the third part, a group of marker genes was also identified that can be used to classify sporadic breast cancer patients with age >55 year into two different prognostic groups—poor prognosis group and good prognosis group. Finally, similar classifiers were identified for prognosis within patient groups with ER+.

[0188] B. Overall Expression Patterns of Breast Cancer Tumors in Patients with Age >55 year.

[0189] Of approximately 25,000 sequences represented on the array, a group of approximately 10,000 genes was selected that were significantly differentially expressed across the group of samples. A gene was deemed significant if (1) it was differentially expressed by more than two-fold, and (2) the absolute value of the p-value of significance for differential expression was less than 0.01 in at least 10 out of the 153 tumor samples. These selection criteria were guided by an error model developed for the null hypothesis of transcript ratio measurements with a two-color-labeled hybridization microarray system.

[0190] An unsupervised clustering algorithm was used to cluster tumors based on their similarities measured over the set of ˜10,000 significant genes. The similarity measure between two patients x and y was defined as

$$S = 1 - [ \begin{matrix}{\sum }_{i = 1}^{{N}_{v}} \frac{( {x}_{i} - \overline{x} )}{{σ}_{{x}_{i}}} \frac{( {y}_{i} - \overline{y} )}{{σ}_{{y}_{i}}} / \\ \sqrt{{\sum }_{i = 1}^{{N}_{v}} {( \frac{{x}_{i} - \overline{x}}{{σ}_{{x}_{i}}} )}^{2} {\sum }_{i = 1}^{{N}_{v}} {( \frac{{y}_{i} - \overline{y}}{{σ}_{{y}_{i}}} )}^{2}}\end{matrix} ] \qquad Equation ( 4 )$$

[0191] In Equation (1), x and y are two patients with components of log ratio xᵢ and yᵢ, i=1, . . . , N. Associated with every value xᵢ is error σₓ_{ᵢ}. The smaller the value σₓ_{ᵢ}, the more reliable the measurement xᵢ. The error-weighted arithmetic mean was calculated as;

$$\overline{x} = {\sum }_{i = 1}^{{N}_{v}} \frac{{x}_{i}}{{σ}_{{x}_{i}}^{2}} / {\sum }_{i = 1}^{{N}_{v}} \frac{1}{{σ}_{{x}_{i}}^{2}} \qquad Equation ( 5 )$$

The use of correlation as similarity metric emphasizes the importance of co-regulation in clustering rather than the amplitude of expression.

[0192] The set of ˜10,000 genes can also be clustered based on their similarities measured over the group of 153 tumor samples. The similarity measure between two genes is defined in the same way as in Equation (1) except that for each gene there are 153 components of log ratio measurements. The two-dimensional clustering results shown in FIG. 1 are genome-wide overview of data representation for the profiled 153 tumor samples. The overall pattern revealed by unsupervised clustering relates to the end-point of interest in this study, i.e., metastasis status. This indicates that the transcriptional profiles of RNA samples from breast tumors measured with microarray technology represent patient disease states of prognostic value, and therefore the use of supervised algorithms should allow identification of predictors and construction of classifiers to differentiate tumors by prognosis.

[0193] C. Testing Predictive Power of the 70-Gene Classifier for Breast Tumor Prognosis

[0194] A 70-gene classifier previously described (van't Veer et al., Nature 415, 530-536 (2002)) was developed using samples from breast tumors from patients <55 years of age. The predictive power and performance of this 70-gene classifier was evaluated across two age groups. With the same procedure detailed in a previous study (van't Veer et al., Nature 415, 530-536 (2002)) and the same threshold used previously, the 70-gene classifier was used to divide all 153 tumor samples into two groups based on the expression of the 70 reporter genes, one with good prognosis and one with poor prognosis. The odds ratio was calculated for the predicted prognosis of all 153 tumor samples in comparison with actual clinical outcomes. The odds ratio of outcome prediction was found to be significant: 2.5 for the overall metastasis, and 5.2 for the 5-year metastasis. The 95% confidence interval is 1.2-5.1 for the overall metastasis and 2.0-13.0 for the 5-year metastasis. These numbers were obtained at a fixed threshold that were defined in our previous study for the age group of <55 years (see Van't Veer (2002)). FIG. 2 shows the total error rate (type 1+type 2 errors) as a function of threshold for overall metastasis of all 153 tumor samples. FIG. 3 shows the gene expression pattern of the 70-reporters for 153 profiled tumor samples. Visually, there are expression patterns in the group of 70 genes that are indicative of disease outcome among the 153 tumors. These results indicate that the classifier based on data from patients with age <55 years has predictive power in prognosis of breast tumors from patients with age >55 years.

[0195] D. Classification Method for Selecting Marker Genes as Prognostic Predictors for Breast Cancers of Patients with Age >55 Years

[0196] 153 tumors from breast cancer patients with age >55 years were used to refine prognostic predictors from gene expression data for this age group. Of the 153 samples in this breast cancer group of age >55 years, 108 samples were from individuals that had no metastasis, among which 89 had a follow up time more than 5 years (collectively the 108 individuals are referred to as the “no-metastasis group”) and 45 samples exhibited metastasizes, among which 29 exhibited metastasis within 5 years of the initial diagnosis (collectively, the “metastasis group”). The goal was to identify a set of marker genes from this data set exhibiting certain expression patterns that allow differentiation of these two subgroups among “sporadic” patients in the age group of >55 years.

[0197] A “leave-one-out” cross-validation method was used to build and evaluate a classifier (See FIG. 4). In this method, one sample is reserved for cross validation each time the classifier is trained. The training of the classifier involves the following steps (1)-(3) for any reserved sample. Steps (1)-(3) are repeated N times for N samples so that each sample is reserved once. See van't Veer et al., Nature 415, 530-536 (2002).

[0198] Selection of Candidate Discriminating Genes

[0199] Non-informative genes in each group of patients were first filtered out. Only genes with | log 10(ratio)|>log 10(2) and P-value (for log(ratio)≠0)<0.01 in more than 3 experiments were selected for the classifier. This step removed all genes that showed no significant change across all samples. In the first step, a set of candidate discriminating genes was identified based on gene expression data of a subset of these 153 samples. The subset of samples used for feature selection were those from individuals having either a good outcome with a follow up time at least 5 years, or a poor outcome metastasized with in 5 years, and those that were not omitted. The correlation ρ between the prognostic category number (metastasis versus non-metastasis) \vec{c} and the logarithmic expression ratio \vec{r} across all tumor samples for each individual gene was calculated as:

ρ=(\vec{c}·\vec{r})/(∥\vec{c}∥·∥\vec{r}∥) Equation (1)

where both C and r in Equation (1) are mean subtracted. Although the majority of genes do not correlate with the prognostic categories, a small group of genes do correlate. Genes with larger correlation coefficients were used as reporters for the prognosis of interest—reoccurrence group and non-reoccurrence group.

[0200] Rank-Ordering of Candidate Discriminating Genes

[0201] In the second step, genes on the candidate list were rank-ordered based on the magnitude of correlation as calculated above.

[0202] Classification Based on Marker Genes

[0203] In the third step, a subset of N genes (as specified by the classifier) from the top of this rank-ordered list was used as discriminating genes. In particular, a template was defined for “good prognosis” group (called \vec{z}₁) by using the error-weighted log ratio average of the selected group of genes. Similarly, a template was defined for “poor prognosis” group (called \vec{z}₂) by using the error-weighted log ratio average of the selected group of genes. Two classifier parameters (P₁ and P₂) were defined based on either correlation or distance. P₁ measures the similarity between one sample \vec{y} and the “good prognosis” template \vec{z}₁ over this selected group of genes. P₂ measures the similarity between one sample \vec{y} and the “poor prognosis” template \vec{z}₂ over this selected group of genes. For correlation case, Pi is defined as:

Pᵢ=(\vec{z}ᵢ·\vec{y})/(∥\vec{z}ᵢ∥·∥\vec{y}∥) Equation (3).

[0204] The performance of a classifier may vary with the number of features used in the classifier. To find the optimal number of features, the above process was repeated by varying the number of features (i.e., genes) starting from 10, and also in increments of 10, to several hundred genes. The error rate is quite stable for marker genes above 100 (see FIG. 7). A set of 200 genes was thus selected as the optimal set of marker genes to classify breast cancer tumors into “poor prognosis” group and “good prognosis” group (see Tables 1 and 2). The classification results made with this optimal set of 200 marker genes are shown in FIG. 6.

### Example 2

### Iterative Algorithm (“Homogenous Method”) to Build Classifier for Prognosis of Breast Tumors from Patients with Age >55 Years

[0205] Another optimal prognosis classifier was constructed using a different algorithm than that described above. The basic algorithm for classification used here is similar to the method previously used, except as noted below.

[0206] A. Feature Selection and Performance Evaluation:

[0207] Non-informative genes were first filtered in each group of patients. Specifically, only genes with | log 10(ratio)|>log 10(2) and P-value (for log(ratio)≠0)<0.01 in more than 3 experiments were selected. This step removed all genes that showed no significant change across all samples. The second step involved a double loop of a leave-one-out cross validation (LOOCV) procedure to select the training samples, classifier features and evaluate the performance. Even though all samples in each group were used to evaluate the classifier, only “training samples” were used to develop the classifier. In the leave-one-out process, if the left-out sample is one of the training samples, it is removed from the feature selection and classifier construction from that leave-one-out step. As above, the classifier features were selected according to correlation with outcome (i.e., good prognosis or poor prognosis). Because of the “iterative training sample selection,” the features selected from each step of the second loop of leave-one-out process were highly overlapping. The final “optimal” reporter genes were selected using all the “training samples” as the result of “re-substitution” because one classifier was needed for each group.

[0208] B. Identification of Homogeneous Patterns and Dominant Mechanism by “Iterative Training Sample Selection”:

[0209] In order to identify homogeneous patterns and reveal the dominant mechanisms, a classifier-building method called “iterative training sample selection” was used. In the first step of this method, only the samples of those patients who had metastasis shorter than 5 years or who were metastasis-free with more than 5 years of follow-up time were used as the training set. Based on these training samples, a complete LOOCV (including reselecting features) process was performed. During this step, the number of features was fixed at 50 genes. This number is chosen to provide a stable classifier by the algorithm. Training samples that were incorrectly predicted (samples from individuals with a poor prognosis correlating more to the average good prognosis profile than the average poor prognosis profile, or vice-versa) by this LOOCV process were removed from the training set in the second round of LOOCV. This is the opposite of the “boost” algorithm (see foe example, Achapire and Singer, Machine Learning 37(3):297-336 (1999)), which increases the weight of the misclassified samples in the training for the accuracy of the classifier. The current algorithm focuses on the most common prediction rule (that is, the mechanism of tumor development) within the data set by excluding “unpredictable,” or incorrectly-predicted, samples from the training set, ensuring robust feature selection. Biologically, for complicated diseases like cancer, there are likely some samples, in a set of samples from individuals with the disease, of tumors that do not develop by the most common mechanism. Including such samples tends to confuse feature selection for the predominant mechanism. Identification of the “unpredictable samples” in the first round of LOOCV, and exclusion of them from the training set of the second round, avoids a confounding factor in feature selection.

[0210] Using this method, a very homogeneous group of genes, many cell cycle-related, was selected. Due to the homogeneous pattern, the classifier accuracy was almost independent of the number of features. Even though the classifier accuracy was not the objective of the current algorithms, the iterative method resulted in an improved accuracy due to the robust feature set.

[0211] C. Error Rate and Odds Ratio, Threshold in the Final LOOCV:

[0212] Unless otherwise stated, the error rate is the average error rate from two populations: the number of poor outcome samples mis-classified as good outcome, divided by the total number of poor samples; and the number of good outcome samples mis-classified as poor outcome, divided by the total number of good samples. Two odds ratios are reported for a given threshold for differentiating good-outcome samples form poor-outcome samples: (1) the overall odds ratio; and (2) the 5 year odds ratio. The 5 year odds ratio was calculated from samples from individuals who were metastasis free for more than five years, or from individuals that had metastasis within 5 years).

[0213] The threshold was applied to cor1-cor2, where “cor1” stands for correlation to the “average good profile” in the training set, and “cor2” stands for the correlation to the “average poor profile” in the training set. The threshold in the final round of LOOCV was defined as follows. (1) For each of the N sample i left out for training, features were selected based on the training set. (2) Given a feature set, an incomplete LOOCV was performed using N−1 samples; only the “average poor profile” and “average good profile” was varied depending on whether the left out sample was in the training set or not. (3) A threshold is then determined based on the minimum error rate from the N−1 samples, and that threshold is assigned to sample i in step (1). This step was repeated for each sample i in the set of samples. (4) The mean threshold from all N samples was then calculated, and designated the final threshold. By this method, the threshold in the classifier did not necessarily correspond to the minimum error rate, hence avoiding overestimating the performance.

[0214] D. Correlation Calculation:

[0215] The correlation between expression log(ratio) and the endpoint data (final outcome) for each gene was calculated using the Pearson's correlation coefficient. The correlation between the profile and the “average good profile” and “average poor profile” for each tumor was the cosine product (no mean subtraction).

[0216] The total error rate as a function of the number of discriminating genes is shown in FIG. 7. Using the above method, an optimal set of 100 genes was identified that was used to build a classifier to predict the prognosis (see Tables 3 and 4). The scattering plot between correlation to “poor prognosis” profile and the correlation to “good prognosis” profile is shown in FIG. 8A. The type 1 error rate, the type 2 error rate, and average error rate are all shown in FIG. 8B as a function of threshold. The heatmap of gene expression for these 100 genes in all 153 samples is shown in FIG. 9.

### Example 3

### Comparison of Three Classifiers

[0217] Table 9 summarizes the results of odds ratio, 95% confidence interval, total error rate, and p-value of log rank comparison test of two survival curves on Kalpan-Meier plots (FIG. 10) for predictions based on leave-one-out procedure from the previously constructed 70-gene based classifier, the 200-gene based classifier constructed by the same method, and the 100-gene based classifier constructed by the new (iterative) method.

TABLE 9
Comparison of three different classifier genesets in the prognosis
of samples from individuals age 55+.

| | | | | average |
|---|---|---|---|---|
| | Overall Odds | 5 year | average Error | Error Rate |
| | Ratio | Odds Ratio | Rate (overall) | (5 year) |
| 70 gene | 2.5 (1.2-5.1) | 5.2 (2.1-13.0) | 0.39 | 0.31 |
| Old method | 2.7 (1.3-5.6) | 5.4 (2.0-14.5) | 0.38 | 0.31 |
| New | 3.0 (1.4-6.5) | 4.5 (1.6-12.8) | 0.38 | 0.34 |
| method | | | | |

From the table and the K-M plots, it is evident that all three methods give similar results. The log rank test indicates that the separation into two prognosis groups has significance by all three classifiers (p<0.01). However, the significances are at similar levels (p=0.0029, 0.0059, and 0.0075 for the 70-gene model, the 200-gene model, and the 100-gene model, respectively).

### Example 4

### Marker Genes as Prognostic Predictors for Breast Cancers in Er+ Group

[0218] The estrogen receptor (ER) level (ER+ or ER−) affects the expression of thousands genes. It hence makes sense to develop a prognosis classifier separately for the ER+ patients and for the ER− patients. All 153 patient samples were divided into two groups, ER+ and ER−. Measurements from a microarray for ESR1 were used to determine the ER status. The threshold used was the same threshold established in the previous study (see Van't Veer (2002)). Samples with ESR1 log(ratio)>-0.65 were called ER+ samples. Of the 153 patients, 118 were ER+ and 35 were ER−. Because of the limited number of samples in the ER− group, only results derived from the ER+ group are discussed herein. Both the old and new method described above were used to build two separate classifiers for disease outcome prediction within ER+ group.

[0219] FIG. 11 shows the total error rate as a function of the number of discriminating genes for both methods. The error rates do not vary significantly with the number of genes in both cases. 200 reporter genes were therefore selected using the old algorithm (Tables 5 and 6), and 100 genes using the new algorithm (Tables 7 and 8). The discriminative patterns of these genes are shown in FIGS. 12 and 13, respectively. FIG. 14 compares the K-M plots for the 70 genes applied to the ER+ samples, the old algorithm and new algorithms. The results show that the old algorithm-derived 200-gene classifier improved significantly on the 70 gene classifier, and was, in turn, improved upon by the new algorithm derived 100-gene classifier (P-value of log-rank test improves from 1% for the 70-gene classifier, to 7.5E-4, and 5.7E-5 for the 200-marker and 100-marker classifiers, respectively). The odds ratio and average error rate (Table 10) also show the same trend. For example, the 5-year average error rate improved from 0.38 (70 gene) to 0.34 (old algorithm), to 0.27 (new algorithm).

TABLE 10
Comparison of three different classifier genesets in the prognosis
of samples from ER+ individuals age 55+.

| | | | average | average |
|---|---|---|---|---|
| | Overall | 5 year | Error Rate | Error Rate |
| | Odds Ratio | Odds Ratio | (overall) | (5 year) |
| 70 gene | 2.0 (0.8-4.8) | 2.9 (0.95-8.8) | 0.42 | 0.38 |
| Old method | 3.9 (1.7-9.3) | 3.9 (1.3-12.2) | 0.34 | 0.34 |
| new | 5.7 (2.3-14.1) | 7.1 (2.1-24.4) | 0.29 | 0.27 |
| method | | | | |

[0220] The gene-expression based classifiers for the purpose of prognosis suggests an application to clinical practices. The present classifier identifies a set of discriminating genes for the purposes of prognosis using gene expression profiles. The molecular classification of breast cancers on the basis of gene expression patterns can thus identify clinically significant subtype of cancers. The present study demonstrates that a global view of gene expression in breast cancer can bring clarity to previously difficult diagnostic categories. The precision of morphological diagnosis, even when assisted by immunohistochemstry for a few markers, was insufficient to identify diagnostic and prognostic subgroups.

### Example 5

### Biological Significance of Diagnostic Marker Genes

[0221] A search in the public domain was performed for functional annotations for several sets of marker genes for breast cancer prognosis in this age group, i.e., >55 years. Available gene descriptions and functional categories are listed in the corresponding table together with the gene list. See Tables 2, 4, 6, and 8. Of the total number of genes in each list, some percentage of genes is annotated. Interestingly, some key words such as “kinase” are involved in multiple genes among the annotated genes.

[0222] Kinases are important regulators of intracellular signal transduction pathways mediating cell proliferation, differentiation and apoptosis. Their activity is normally tightly controlled and regulated. Overexpression of certain kinases is known to be involved in oncogenesis, such as vascular endothelial growth factor receptors (VEGFR1 or FLT1), a tyrosine kinase that is an indicator of poor prognosis, which plays a very important role in tumor angiogenesis. Interestingly, vascular endothelial growth factor (VEGF), VEGFR's ligand, is also an indicator of poor prognosis, which means both ligand and receptor are co-upregulated in poor prognostic patients by an unknown mechanism. Given the total number of genes annotated among all 24,479 genes represented on the microarrays, an estimate the over-representation of the key word “kinase” in the list of genes of interest, and of the p-value of the number of “kinase” genes in the list, was made.

[0223] Cancer is characterized by deregulated cell proliferation. On the simplest level, this requires division of the cell, or mitosis. By keyword searching, “cell division” or “mitosis” was found to be included in 7 genes respectively in the 72 annotated entries from 156 genes indicating poor prognosis, and in zero genes in the 28 annotated genes from 75 genes that are indicators of good prognosis. Of 24,479 genes represented on the microarrays, there are 7,586 genes with annotations to date. “Cell division” is found in 62 gene annotations, and “mitosis” is found in 37 genes annotations. Given these statistics, the p-value that seven “cell division” or “mitosis” related genes in the group that are indicators of poor prognosis was estimated to be very significant (p-value=3.5×10⁻⁵). In comparison, the fact that no “cell division” or “mitosis” genes were found in the group of genes that are indicators of good prognosis was not found to be significant (p-value=0.69).

[0224] Cyclins, the regulatory subunits of cyclin-dependent kinases, control cell division or mitosis through key check-points within the cell cycle. Dysregulated expression and function of cyclins can lead to loss of normal growth control and cause uncontrolled expansion and invasion. Cyclin B2 and E2 were found to be overexpressed in poor prognostic patients.

[0225] Perspectives

[0226] The utility of classification by gene expression profiles is not limited to diagnosis and prognosis. Two developments may be anticipated in the near future as gene expression profiling becomes more widely used in medicine. First development would be identification of gene sets as predictors for prognosis of different cancer patients. It is expected that patient outcomes or response to therapy may be predicted by the overall expression pattern and/or the behavior of a set of specific marker genes. Identification of such markers is important beyond its diagnostic and prognostic potential, because in some cases a marker gene will itself contribute to tumor physiology. As microarray technology improves and becomes more widely available, expression analysis of a large variety of clinical samples will likely be employed to identify markers or patterns for diagnostic and prognostic purposes. If microarrays can then be manufactured at sufficiently low cost and reproducibility issues relating to sample purity and signal amplification convincingly resolved, expression profiles could become a standard molecular diagnostic and prognostic test. This new test could have substantially high specificity and sensitivity in situations where classical histo- or immunopathological approaches are unsatisfactory. The other development would be the discovery of candidate targets for therapy. It is conceivable that detailed studies of marker genes could help shed light into the underlying biological basis of different cancers and therefore could help identify corresponding therapeutic targets.

### 7. REFERENCES

[0227] All references cited herein are incorporated herein by reference in their entirety and for all purposes to the same extent as if each individual publication or patent or patent application was specifically and individually indicated to be incorporated by reference in its entirety for all purposes.

[0228] Many modifications and variations of the present invention can be made without departing from its spirit and scope, as will be apparent to those skilled in the art. The specific embodiments described herein are offered by way of example only, and the invention is to be limited only by the terms of the appended claims along with the full scope of equivalents to which such claims are entitled.

1. A computer-implemented method for determining a prognosis of an individual having breast cancer, comprising:
classifying, on a computer, said individual as having a good prognosis or a poor prognosis based on an expression profile comprising measurements of expression levels of a plurality of genes in a cell sample taken from the individual, said plurality of genes comprising 10 different genes for which markers are listed in any one or more of Tables 1, 3, 5 and 7 (SEQ ID NOS:1-387), wherein a good prognosis predicts no reoccurrence or metastasis within a predetermined period after initial diagnosis, and wherein a poor prognosis predicts reoccurrence or metastasis within said predetermined period after initial diagnosis.

2. The method of claim 1, wherein said plurality of genes comprises 20 different genes for which markers are listed in any one or more of Tables 1, 3, 5 and 7 (SEQ ID NOS:1-387).

3. The method of claim 1, wherein said plurality of genes comprises 50 different genes for which markers are listed in any one or more of Tables 1, 3, 5 and 7 (SEQ ID NOS:1-387).

4. The method of claim 1, wherein said plurality of genes comprises each of the genes for which markers are listed in Table 1.

5. The method of claim 1, wherein said plurality of genes comprises each of the genes for which markers are listed in Table 3.

6. The method of claim 1, wherein said individual is identified as ER+ (estrogen receptor positive), and said plurality of genes comprises 10 of the genes for which markers are listed in Table 5.

7. The method of claim 1, wherein said individual is identified as ER+ (estrogen receptor positive), and said plurality of genes comprises 50 of the genes for which markers are listed in Table 5.

8. The method of claim 1, wherein said individual is identified as ER+ (estrogen receptor positive), and said plurality of genes comprises each of the genes for which markers are listed in Table 5.

9. The method of claim 1, wherein said individual is identified as ER+ (estrogen receptor positive), and said plurality of genes comprises 10 of the genes for which markers are listed in Table 7.

10. The method of claim 1, wherein said individual is identified as ER+ (estrogen receptor positive), and said plurality of genes comprises 50 of the genes for which markers are listed in Table 7.

11. The method of claim 1, wherein said individual is identified as ER+ (estrogen receptor positive), and said plurality of genes comprises each of the genes for which markers are listed in Table 7.

12. The method of claim 1, wherein said classifying is carried out by a method comprising:
(a) comparing said expression profile to a good prognosis template comprising measurements of expression levels of said plurality of genes representative of expression levels of said plurality of genes in a plurality of good prognosis patients and/or to a poor prognosis template comprising measurements of expression levels of said plurality of genes representative of expression levels of said plurality of genes in a plurality of poor prognosis patients; and
(b) classifying said individual as having a good prognosis if said expression profile has a high similarity to said good prognosis template and/or has a low similarity to said poor prognosis template, or classifying said individual as having a poor prognosis if said expression profile has a low similarity to said good prognosis template and/or a high similarity to said poor prognosis template, wherein a high similarity corresponds to a degree of similarity above a predetermined threshold, and wherein a low similarity corresponds to a degree of similarity no greater than said predetermined threshold.

13. The method of claim 12, wherein the respective measurement of expression level of each gene in said plurality of genes in said good prognosis template or said poor prognosis template is an average of measured values of the expression levels of said gene in said plurality of good prognosis patients or in said plurality of poor prognosis patients, respectively.

14. The method of claim 13, wherein said average is an error-weighted average.

15. The method of claim 12, wherein said measurement of expression level of each gene in said expression profile is a differential expression level of said gene in said cell sample versus said gene in a first reference pool, represented as a log ratio; wherein the respective measurement of expression level of each gene in said plurality of genes in said good prognosis template is a differential expression level of said gene in said plurality of good prognosis patients versus said gene in a second reference pool, represented as a log ratio; and wherein the respective measurement of expression level of each gene in said plurality of genes in said poor prognosis template is a differential expression level of said gene in said plurality of poor prognosis patients versus said gene in a third reference pool, represented as a log ratio.

16. The method of claim 15, wherein the respective log ratio for each gene in said plurality of genes in said good prognosis template or said poor prognosis template is an average of the log ratios for said gene in said plurality of good prognosis patients or in said plurality of poor prognosis patients, respectively.

17. The method of claim 16, wherein said average is an error-weighted log ratio average.

18. The method of claim 12, said method comprising
(a) comparing said expression profile to a good prognosis template comprising measurements of expression levels of said plurality of genes representative of expression levels of said plurality of genes in a plurality of good prognosis patients; and
(b) classifying said individual as having a good prognosis if said expression profile has a high similarity to said good prognosis template, or classifying said individual as having a poor prognosis if said expression profile has a low similarity to said good prognosis template, wherein said similarity to said good prognosis template is represented by a first correlation coefficient between said expression profile and said good prognosis template, wherein said expression profile is said to have a high similarity to said good prognosis template if said first correlation coefficient between said expression profile and said good prognosis template is above a first threshold, and is said to have a low similarity to said good prognosis template if said first correlation coefficient between said expression profile and said good prognosis template is not above said first threshold.

19. The method of claim 18, wherein the respective measurement of expression level of each gene in said plurality of genes in said good prognosis template is an average of measured values of the expression levels of said gene in said plurality of good prognosis patients.

20. The method of claim 19, wherein said average is an error-weighted average.

21. The method of claim 18, wherein said measurement of expression level of each gene in said expression profile is a differential expression level of said gene in said cell sample versus said gene in a first reference pool, represented as a log ratio, and wherein the respective measurement of expression level of each gene in said plurality of genes in said good prognosis template is a differential expression level of said gene in said plurality of good prognosis patients versus said gene in a second reference pool, represented as a log ratio.

22. The method of claim 21, wherein the respective log ratio for each gene in said plurality of genes in said good prognosis template is an average of the log ratios for said gene in said plurality of good prognosis patients.

23. The method of claim 22, wherein said average is an error-weighted log ratio average.

24. The method of claim 18, wherein said first correlation coefficient between said expression profile and said good prognosis template is calculated according to the equation
P₁=(\vec{z}ᵢ·\vec{y})/(∥\vec{z}₁∥·∥\vec{y}∥)
wherein \vec{y} represents said expression profile, \vec{z}₁ represents said good prognosis template, and P₁ represents said first correlation coefficient between said expression profile and said good prognosis template.

25. The method of claim 1, wherein said classifying is carried out by a method comprising
(a) comparing said expression profile to a good prognosis template comprising measurements of expression levels of said plurality of genes representative of expression levels of said plurality of genes in a plurality of good prognosis patients and to a poor prognosis template comprising measurements of expression levels of said plurality of genes representative of expression levels of said plurality of genes in a plurality of poor prognosis patients; and
(b) classifying said individual as having a good prognosis if said expression profile has a higher similarity to said good prognosis template than to said poor prognosis template, or as having a poor prognosis if said expression profile has a higher similarity to said poor prognosis template than to said good prognosis template.

26. The method of claim 25, wherein the respective measurement of expression level of each gene in said plurality of genes in said good prognosis template and said poor prognosis template is an average of measured values of the expression levels of said gene in said plurality of good prognosis patients or in said plurality of poor prognosis patients, respectively.

27. The method of claim 26, wherein said average is an error-weighted average.

28. The method of claim 25, wherein said measurement of expression level of each gene in said expression profile is a differential expression level of said gene in said cell sample versus said gene in a first reference pool, represented as a log ratio; wherein the respective measurement of expression level of each gene in said plurality of genes in said good prognosis template is a differential expression level of said gene in said plurality of good prognosis patients versus said gene in a second reference pool, represented as a log ratio; and wherein the respective measurement of expression level of each gene in said plurality of genes in said poor prognosis template is a differential expression level of said gene in said plurality of poor prognosis patients versus said gene in a third reference pool, represented as a log ratio.

29. The method of claim 28, wherein the respective log ratio for each gene in said plurality of genes in said good prognosis template and said poor prognosis template is an average of the log ratios for said gene in said plurality of good prognosis patients or in said plurality of poor prognosis patients, respectively.

30. The method of claim 29, wherein said average is an error-weighted log ratio average.

31. The method of claim 25, wherein said similarity to said good prognosis template is represented by a first correlation coefficient between said expression profile and said good prognosis template, wherein said similarity to said poor prognosis template is represented by a second correlation coefficient between said expression profile and said poor prognosis template, and wherein said expression profile is said to have a higher similarity to said good prognosis template than to said poor prognosis template if said first correlation coefficient between said expression profile and said good prognosis template is greater than said second correlation coefficient between said expression profile and said good prognosis template.

32. The method of claim 31, wherein said first and second correlation coefficients between said expression profile and said good prognosis template and said poor prognosis template, respectively, are respectively calculated according to the equation
Pᵢ=(\vec{z}ᵢ·\vec{y})/(∥\vec{z}ᵢ∥·∥\vec{y}∥)
where i=1 and 2, wherein \vec{y} represents said expression profile, \vec{z}₁ represents said good prognosis template, and \vec{z}₂ represents said poor prognosis template, wherein P₁ represents said first correlation coefficient between said expression profile and said good prognosis template, and P₂ represents said second correlation coefficient between said expression profile and said poor prognosis template.

33. A method for determining a prognosis of an individual having breast cancer, comprising:
classifying said individual as having a good prognosis or a poor prognosis based on an expression profile comprising measurements of expression levels of a plurality of genes in a cell sample taken from the individual, said plurality of genes comprising 10 different genes for which markers are listed in any one or more of Tables 1, 3, 5 and 7 (SEQ ID NOS:1-387), wherein a good prognosis predicts no reoccurrence or metastasis within a predetermined period after initial diagnosis, and wherein a poor prognosis predicts reoccurrence or metastasis within said predetermined period after initial diagnosis, wherein said classifying comprises the steps of:
(a) generating a good prognosis template by hybridization of nucleic acids derived from a plurality of good prognosis patients against nucleic acids derived from a pool of tumors from a plurality of patients having breast cancer;
(b) generating a poor prognosis template by hybridization of nucleic acids derived from a plurality of poor prognosis patients against nucleic acids derived from said pool of tumors from said plurality of patients;
(c) generating said expression profile by hybridizing nucleic acids derived from said cell sample taken from said individual against said pool; and
(d) determining the similarity of said expression profile to the good prognosis template and to the poor prognosis template, wherein if said expression profile is more similar to the good prognosis template, the individual is classified as having a good prognosis, and if said expression profile is more similar to the poor prognosis template, the individual is classified as having a poor prognosis.

34. A computer-implemented method for assigning a person to one of a plurality of categories in a clinical trial, comprising.
(a) classifying, on a computer, said individual as having a good prognosis or a poor prognosis based on an expression profile comprising measurements of expression levels of a plurality of genes in a cell sample taken from the individual, said plurality of genes comprising 10 different genes for which markers are listed in any one or more of Tables 1, 3, and 7 (SEQ ID NOS:1-387), wherein a good prognosis predicts no reoccurrence or metastasis within a predetermined period after initial diagnosis, and wherein a poor prognosis predicts reoccurrence or metastasis within said predetermined period after initial diagnosis; and
(b) assigning said person to one category in a clinical trial if said person is classified as having a good prognosis, and a different category if that person is classified as having a poor prognosis.

35. The method of claim 18, said method further comprising classifying said individual as having a very good prognosis if said first correlation coefficient between said expression profile and said good prognosis template is above a second threshold, said second threshold is greater than said first threshold, or an intermediate prognosis if said first correlation coefficient between said expression profile and said good prognosis template is above a first threshold but not above said second threshold is greater than said first threshold.

36. The method of claim 1, wherein said measurement of expression level of each gene in said expression profile is a differential expression level of said gene in said cell sample versus said gene in a reference pool.

37. The method of claim 36, wherein said differential expression level is represented as a log ratio.

38. The method of any one of claim 1, wherein said reference pool is derived from a normal breast cell line or from a breast cancer cell line or from tumors from sporadic breast cancer patients.

39. A method for determining a prognosis of an individual having breast cancer, comprising:
(a) determining an expression profile by measuring expression levels of a plurality of genes in a cell sample taken from said individual, said plurality of genes comprising 10 different genes for which markers are listed in any one or more of Tables 1, 3, 5 and 7 (SEQ ID NOS:1-387); and
(b) classifying said individual as having a good prognosis or a poor prognosis based on said expression profile, wherein a good prognosis predicts no reoccurrence or metastasis within a predetermined period after initial diagnosis, and wherein a poor prognosis predicts reoccurrence or metastasis within said predetermined period after initial diagnosis.

40. The method of claim 1, wherein said individual is 55 years of age or older.

41. The method of claim 1, wherein said predetermined period is 5 years.

42-58. (canceled)

The application's sequence listing, which the Patent Office published only in electronic form, follows.

SEQUENCE LISTING (774 sequences)

SEQ ID NO: 1 - DNA, 6618 bp, Homo sapiens
  ref <308>: DATABASE ACCESSION NUMBER: AB007913
gggaaccaagtatcgctgctcaacatcatgatggacctgaaaaagtgctgcaaccacccctacctcttccctgtggctgccgtggaggcccctgtcttgcccaatggctcctacgatggaagctccctggtcaagtcttcagggaagctcatgctgctacagaagatgctgaagaaactgcgggatgaggggcaccgtgtgctcatcttctcccagatgaccaagatgctggacctcctggaggacttcctggagtacgaaggctacaagtatgagcggattgatggtggcatcaccgggggcctccggcaggaggcaatcgacagattcaatgcccccggggcccagcagttctgcttcctcctctcaacccgggcaggtggtctgggcatcaacctggccacggcggacactgtcatcatctacgactcggactggaacccgcacaatgacatccaggccttcagccgcgcccaccgcatcggccagaacaagaaggtgatgatctaccgcttcgtgactcgggcctcggtggaggagcgcatcacgcaggtggccaagcgcaagatgatgctcacccacctggtggtgcggcccggcctcggctccaagtcggggtccatgaccaagcaggagctggacgacatcctcaagttcggcacggaggaactcttcaaggacgacgtggagggcatgatgtctcagggccagaggccggtcacacccatccctgatgtccagtcctccaaaggggggaacttggccgccagtgcaaagaagaagcacggtagcaccccgccaggtgacaacaaggacgtggaggacagcagtgtgatccactatgacgatgcggccatctccaagctgctggaccggaaccaggacgctacagatgacacggagctacagaacatgaacgagtacctgagctccttcaaggtggcgcagtacgtggtgcgcgaggaggacggcgtggaggaggtggagcgggaaatcatcaagcaggaggagaacgtggaccccgactactgggagaagctgctgcggcaccactatgagcagcagcaggaggacctggcccgcaacctgggcaagggcaagcgcatccgcaagcaggtcaactacaacgatgcctcccaggaggaccaggagtggcaggatgagctctctgataaccagtcagaatattccattggctctgaggatgaggatgaggactttgaagagaggccggaagggcagagtggacgacgacaatcccggaggcagctgaagagtgacagggacaagcccctgcccccgcttctcgcccgagttggtggcaacatcgaggtgctgggcttcaatgcccgacagcggaaggcctttctgaacgccatcatgcgctggggcatgcccccgcaggacgccttcaactcccactggctggtgcgggaccttcgagggaagagcgagaaggagtttagagcctatgtgtccctcttcatgcggcacctgtgtgagccgggggcggatggtgcagagaccttcgcagacggcgtgccccgggagggcctctccaggcagcacgtgctgacccgcatcggggtcatgtcactagttaggaagaaggttcaggagtttgagcatgtcaacgggaagtacagcaccccagacttgatccctgaggggcccgaggggaagaagccgggcgaggtgatctcctcggaccccaacacaccagtgcccgccagccctgcccacctcctgccagccccgctgggcctgccagacaaaatggaagcccagctgggctacatggatgagaaagaccccggggcacagaagccaaggcagcccctggaagtccaggcccttccagccgccttggatagagtggagagtgaggacaagcacgagagcccagccagcaaggagagagcccgagaggagcggccagaggagacggagaaggccccgccctccccggagcagctgccgagagaggaggtgcttcctgagaaggagaagatcctggacaagctggagctgagcttgatccacagcagaggggacagttccgaactcaggccagatgacaccaaggctgaggagaaggagcccattgaaacacagcaaaatggtgacaaagaggaagatgacgaggggaagaaggaggacaagaaggggaaattcaagttcatgttcaacatcgcggacgggggcttcacggagttgcacacgctgtggcagaacgaggagcgggctgctgtatcctctgggaaaatctacgacatctggcaccggcgccatgactactggctgctggcgggcatcgtgacgcacggctacgcccgctggcaggacatccagaatgacccacggtacatgatcctcaacgagcccttcaagtctgaggtccacaagggcaactacctggagatgaagaacaagttcctggcccgcaggtttaagctgctggagcaggcgttggtcattgaggagcagctccggagggccgcgtacctgaacatgacgcaggaccccaaccaccccgccatggccctcaacgcccgcctggctgaagtggagtgcctcgccgagagccaccagcacctgtccaaggagtcccttgctgggaacaagcctgccaatgccgtcctgcacaaggtcctgaaccagctggaggagctgctgagcgacatgaaggccgacgtgacccggctgccatccatgctgtcccgcatccccccggtggccgcccggctgcagatgtcggagcgcagcatcctgagccgcctgaccaaccgcgccggggaccccaccatccagcagggcgctttcggctcctcccagatgtacagcaacaactttgggcccaacttccggggccctggaccgggagggattgtcaactacaaccagatgcccctggggccctatgtgaccgatatctagccgtcctcgagacttccctgtgttgcagcgctcatttccagctgagccacgcctgccgggccacctgcccgacccacatgggagagaaaagctgccacctttttaggagccagcgccaccttgggacaaaaagggaaacctagtaatgccatcacatggaggacgaggcccagctcagctgggccagagcccagaagtgccacctcatcataattcaagtgttcttccacacagcgttgcccccacaaccacgccggacgtgccccctcgccaccttttccagacgacttcttagaagagatttcatttatttgtacatcttttgcactttcctattgaagacttgaacacgtttgtcttgataaaagttggatgacgtatggaagattcgaacctgcagcactgatgtctctttaccgatgggttccagacccaaggtagtcctggcactgccctgtggactcagcccagctggggaggacatggcgcccggtgccctaggagccctcagtgtcccctacctgacctgtctgcacctgtgtgacagccccttctgatttggccccctgcccgcttggagcctcccagcaccagacagggcaggtttggggagccgctgtcgagccctatggtgagaccctggctgacatttcccctccttcctgccaaggctggaggccgccaggtgtttgctctctccttgtggggaggtggatcctctgccagcaggtgtctgtccccggcccagcgcatcttgaaggccctggactctgttaccagtggggggcctgtggccccggctcttcacagcaggcagaagcgtatgatcccagggagggtgggctgggggggggccagcacttgcctcggagccactgctgcgttgggtttgccttctgccagaggtgtggttaagggcagtgatagctgcgccccagcaaggagggtcatgggccctgagctggcccaggagaccctggccctgccctgtgccctgggatgcctaccctgcccacctccggaggtggaaccgggctgcccctgggggcctggacttgtcccattcccctgtccctggaaaggccttcccgggggctttttgcctgaggctgcactcttggaaggtgtggggagagttctgcctggagggggactggacccagtgccctctgcagacccctcccagccgcagcaccaagggcttgctgccttgtttcctgccaggagcgccctgacatcccaaaaccatcttcccacatgtgggttgttggaatcccacccactcccccggaccctgcccctccaagttggggacggagatggggagcaggtcaggccctccctaggcctgtttgtgtgtgatccttctcctggccccaggtcgacctggaaggcgtttctgagtcttgtactgggaccttcccagggaaggtgccttggggtgcagaatcctgggaatgttaggaaagggctgcgtgaaaaacccagctgggcctggggtggaggtgcacacgggctggggctcagctccttggagagggcctgcctgggactgagggggccagggctgggtcaggattcaccagcttgtgttgcagacactggagcaattgcctggccctccctaagccctatatgcctcactcataatgaggctgtctctgaaccccggagggcgggacctacaagtccttcctcttggcgcattcccacactccagtctggatccaggtctgcaaggccagcccgaccctgacactgcacgtgggcgtagtggggagcaccctggagtggagatgattgtcagcgggctcacatgttatggttcatccacatgcgtgttgtgtgctctgcggtgcctcctggcaaagggtcctggctcgggtcagaagctcactcccgtgccctcgtccccaaacaagcagtggcaagcactggggttggccctcgttgggagcagtgcccaccttccttggcccacagcagataggtcccgagcagcaggactggaggcctgtggcggtcagggcaggggtctgtgtctccaccccaagggctgatggtccctcccctgtgcgccttcctctcaggcaggcttgctctgtcccttcctctctgcttccctcccaggcctcgccagggctcccttctcctctgcctggttagactcgggcacccaggaaagcctggccagggctcctttgggcctgggccccctgcactgcctggtccagaaggggtggtgctgtccgtggccagcaccccggggcccgggaggggtgggctactagagtcagagcgggtttggggctgaccagtttgggagaggagaaaagatctgagaatgtccttcttggtttgtcagtcatctctgccaaaagtggtgatggtggtgtccgtatgtttggcgtctttgggctgggtttggtttttgctgctggtagaatcagggtcctcgggcatgaacgcgagcccaaagtgccagtctgcgattggaaatttccagccactttaagccagtgctgagtagggcttctgcagagccatgtttgagccaaggtcttggaaggcattgccccatgggctcaggtgactcggggtggagtgagcacgtctgcagggccctctcatacacgcctgaggcagaagcagcgtcccccgtgaaagccaccttccgaagctcctgcgttttttgcaaacttggcttcccccaggggcaggctggactttccctgccccctatgattgaagtcctcctgcttttgggggctgccttcccagagtcccccgggtgctcccctgccgaggtcaggagctgaccaagccttggcccggtgacacctgcagccctcactcctgtcatcccaggacacttgaggcccaaggaggtggagtggagagtgggctcgggtacatgggagccagaagccagatggacttggtcaagtgttggtcacttggagcctccagtgtgcgtcagggtctgtgggcaggggacagggcgtgggtgggggccgaggctggcacgcccctctgccctcaccgtcttggtgacctggcctcggcccctcccccaagtctcttctgtgcaaggcccgcctcggcctcggcagctggttcctgtcccgttttctgtgtctgaaagtttacaggttgtggtgcatcagcccaaactcactggcgttgtgttttttttttctttaattttcagattttttttttaaacaaagtatttttttaggtgcgataacccagaaagggcccgttgggtgtgtgtgtgtgtcctgaactcctcaagcagcgattggagcccaagcacccctggagaggaagggagggtccccactggcccgtggggtctgagttcaggggtgtggagggagcagactccaccggcccaggcccagctaagagggggccgacccctttccccaggcacagccccaggctggcaaagggagggccctgggctgggtgcagggcgcgccaggagtcccagccagggtggccccggcgggggcgggtccagctttggaagccaggctcccctgtgagccgtggcttgtctggtcttcgcccacgggaggctggacagaggctgtagccaacacaatcacctttactttgtactctgtgtgtatgttttggttttctgtgttttaataaatcctttgggaaagg

SEQ ID NO: 2 - DNA, 3403 bp, Homo sapiens
  ref <308>: DATABASE ACCESSION NUMBER: AB024704
caggtctgaggcgaagctaggtgagccgtgggaagaaaagagggagcagctagggcgcgggtctccctcctcccggagtttggaacggctgaagttcaccttccagcccctagcgccgttcgcgccgctaggcctggcttctgaggcggttgcggtgctcggtcgccgcctaagcggggcagggtgcgaacaggggcttcgggccacgcttctcttggcgacaggattttgctgtgaagtccgtccgggaaacggaggaaaaaaagagttgcgggaggctgtctgctaataacggttcttgatacatatttgccagacttcaagatttcagaaaaggggtgaaagagaagattgcaactttgagtcagacctgtaggcctgatagactgattaaaccacagaaggtgacctgctgagaaaagtggtacaaatactgggaaaaacctgctcttctgcgttaagtgggagacaatgtcacaagttaaaagctcttattcctatgatgccccctcggatttcatcaatttttcatccttggatgatgaaggagatactcaaaacatagattcatggtttgaggagaaggccaatttggagaataagttactggggaagaatggaactggagggctttttcagggcaaaactcctttgagaaaggctaatcttcagcaagctattgtcacacctttgaaaccagttgacaacacttactacaaagaggcagaaaaagaaaatcttgtggaacaatccattccgtcaaatgcttgttcttccctggaagttgaggcagccatatcaagaaaaactccagcccagcctcagagaagatctcttaggctttctgctcagaaggatttggaacagaaagaaaagcatcatgtaaaaatgaaagccaagagatgtgccactcctgtaatcatcgatgaaattctaccctctaagaaaatgaaagtttctaacaacaaaaagaagccagaggaagaaggcagtgctcatcaagatactgctgaaaacaatgcatcttccccagagaaagccaagggtagacatactgtgccttgtatgccacctgcaaagcagaagtttctaaaaagtactgaggagcaagagctggagaagagtatgaaaatgcagcaagaggtggtggagatgcggaaaaagaatgaagaattcaagaaacttgctctggctggaatagggcaacctgtgaagaaatcagtgagccaggtcaccaaatcagttgacttccacttccgcacagatgagcgaatcaaacaacatcctaagaaccaggaggaatataaggaagtgaactttacatctgaactacgaaagcatccttcatctcctgcccgagtgactaagggatgtaccattgttaagcctttcaacctgtcccaaggaaagaaaagaacatttgatgaaacagtttctacatatgtgccccttgcacagcaagttgaagacttccataaacgaacccctaacagatatcatttgaggagcaagaaggatgatattaacctgttaccctccaaatcttctgtgaccaagatttgcagagacccacagactcctgtactgcaaaccaaacaccgtgcacgggctgtgacctgcaaaagtacagcagagctggaggctgaggagctcgagaaattgcaacaatacaaattcaaagcacgtgaacttgatcccagaatacttgaaggtgggcccatcttgcccaagaaaccacctgtgaaaccacccaccgagcctattggctttgatttggaaattgagaaaagaatccaggagcgagaatcaaagaagaaaacagaggatgaacactttgaatttcattccagaccttgccctactaagattttggaagatgttgtgggtgttcctgaaaagaaggtacttccaatcaccgtccccaagtcaccagcctttgcattgaagaacagaattcgaatgcccaccaaagaagatgaggaagaggacgaaccggtagtgataaaagctcaacctgtgccacattatggggtgccttttaagccccaaatcccagaggcaagaactgtggaaatatgccctttctcgtttgattctcgagacaaagaacgtcagttacagaaggagaagaaaataaaagaactgcagaaaggggaggtgcccaagttcaaggcacttcccttgcctcattttgacaccattaacctgccagagaagaaggtaaagaatgtgacccagattgaacctttctgcttggagactgacagaagaggtgctctgaaggcacagacttggaagcaccagctggaagaagaactgagacagcagaaagaagcagcttgtttcaaggctcgtccaaacaccgtcatctctcaggagccctttgttcccaagaaagagaagaaatcagttgctgagggcctttctggttctctagttcaggaaccttttcagctggctactgagaagagagccaaagagcggcaggagctggagaagagaatggctgaggtagaagcccagaaagcccagcagttggaggaggccagactacaggaggaagagcagaaaaaagaggagctggccaggctacggagagaactggtgcataaggcaaatccaatacgcaagtaccagggtctggagataaagtcaagtgaccagcctctgactgtgcctgtatctcccaaattctccactcgattccactgctaaactcagctgtgagctgcggataccgcccggcaatgggacctgctcttaacctcaaacctaggaccgtcttgctttgtcattgggcatggagagaacccatttctccagacttttacctacccgtgcctgagaaagcatacttgacaactgtggactccagttttgttgagaattgttttcttacattactaaggctaataatgagatgtaactcatgaatgtctcgattagactccatgtagttacttcctttaaaccatcagccggccttttatatgggtcttcactctgactagaatttagtctctgtgtcagcacagtgtaatctctattgctattgccccttacgactctcaccctctccccactttttttaaaaattttaaccagaaaataaagatagttaaatcctaagatagagattaagtcatggtttaaatgaggaacaatcagtaaatcagattctgtcctcttctctgcataccgtgaatttatagttaaggatccctttgctgtgagggtagaaaacctcaccaactgcaccagtgaggaagaagactgcgtggattcatggggagcctcacagcagccacgcagcaggctctgggtggggctgccgttaaggcacagttctttccttactggtgctgataacaacagggaaccgtgcagtgtgcattttaagacc

SEQ ID NO: 3 - DNA, 4834 bp, Homo sapiens
  ref <308>: DATABASE ACCESSION NUMBER: AB029000
gatgtggagctggggtccctgcaagtcatgaacaaaacgagaaagattatggaacatgggggggccaccttcatcaatgcctttgtgactacacccatgtgctgcccgtcacggtcctccatgctcaccgggaagtatgtgcacaatcacaatgtctacaccaacaacgagaactgctcttccccctcgtggcaggccatgcatgagcctcggacttttgctgtatatcttaacaacactggctacagaacagccttttttggaaaatacctcaatgaatataatggcagctacatcccccctgggtggcgagaatggcttggattaatcaagaattctcgcttctataattacactgtttgtcgcaatggcatcaaagaaaagcatggatttgattatgcaaaggactacttcacagacttaatcactaacgagagcattaattacttcaaaatgtctaagagaatgtatccccataggcccgttatgatggtgatcagccacgctgcgccccacggccccgaggactcagccccacagttttctaaactgtaccccaatgcttcccaacacataactcctagttataactatgcaccaaatatggataaacactggattatgcagtacacaggaccaatgctgcccatccacatggaatttacaaacattctacagcgcaaaaggctccagactttgatgtcagtggatgattctgtggagaggctgtataacatgctcgtggagacgggggagctggagaatacttacatcatttacaccgccgaccatggttaccatattgggcagtttggactggtcaaggggaaatccatgccatatgactttgatattcgtgtgcctttttttattcgtggtccaagtgtagaaccaggatcaatagtcccacagatcgttctcaacattgacttggcccccacgatcctggatattgctgggctcgacacacctcctgatgtggacggcaagtctgtcctcaaacttctggacccagaaaagccaggtaacaggtttcgaacaaacaagaaggccaaaatttggcgtgatacattcctagtggaaagaggcaaatttctacgtaagaaggaagaatccagcaagaatatccaacagtcaaatcacttgcccaaatatgaacgggtcaaagaactatgccagcaggccaggtaccagacagcctgtgaacaaccggggcagaagtggcaatgcattgaggatacatctggcaagcttcgaattcacaagtgtaaaggacccagtgacctgctcacagtccggcagagcacgcggaacctctacgctcgcggcttccatgacaaagacaaagagtgcagttgtagggagtctggttaccgtgccagcagaagccaaagaaagagtcaacggcaattcttgagaaaccaggggactccaaagtacaagcccagatttgtccatactcggcagacacgttccttgtccgtcgaatttgaaggtgaaatatatgacataaatctggaagaagaagaagaattgcaagtgttgcaaccaagaaacattgctaagcgtcatgatgaaggccacaaggggccaagagatctccaggcttccagtggtggcaacaggggcaggatgctggcagatagcagcaacgccgtgggcccacctaccactgtccgagtgacacacaagtgttttattcttcccaatgactctatccattgtgagagagaactgtaccaatcggccagagcgtggaaggaccataaggcatacattgacaaagagattgaagctctgcaagataaaattaagaatttaagagaagtgagaggacatctgaagagaaggaagcctgaggaatgtagctgcagtaaacaaagctattacaataaagagaaaggtgtaaaaaagcaagagaaattaaagagccatcttcacccattcaaggaggctgctcaggaagtagatagcaaactgcaacttttcaaggagaacaaccgtaggaggaagaaggagaggaaggagaagagacggcagaggaagggggaagagtgcagcctgcctggcctcacttgcttcacgcatgacaacaaccactggcagacagccccgttctggaacctgggatctttctgtgcttgcacgagttctaacaataacacctactggtgtttgcgtacagttaatgagacgcataattttcttttctgtgagtttgctactggctttttggagtattttgatatgaatacagatccttatcagctcacaaatacagtgcacacggtagaacgaggcattttgaatcagctacacgtacaactaatggagctcagaagctgtcaaggatataagcagtgcaacccaagacctaagaatcttgatgttggaaataaagatggaggaagctatgacctacacagaggacagttatgggatggatgggaaggttaatcagccccgtctcactgcagacatcaactggcaaggcctagaggagctacacagtgtgaatgaaaacatctatgagtacagacaaaactacagacttagtctggtggactggactaattacttgaaggatttagatagagtatttgcactgctgaagagtcactatgagcaaaataaaacaaataagactcaaactgctcaaagtgacgggttcttggttgtctctgctgagcacgctgtgtcaatggagatggcctctgctgactcagatgaagacccaaggcataaggttgggaaaacacctcatttgaccttgccagctgaccttcaaaccctgcatttgaaccgaccaacattaagtccagagagtaaacttgaatggaataacgacattccagaagttaatcatttgaattctgaacactggagaaaaaccgaaaaatggacggggcatgaagagactaatcatctggaaaccgatttcagtggcgatggcatgacagagctagagctcgggcccagccccaggctgcagcccattcgcaggcacccgaaagaacttccccagtatggtggtcctggaaaggacatttttgaagatcaactatatcttcctgtgcattccgatggaatttcagttcatcagatgttcaccatggccaccgcagaacaccgaagtaattccagcatagcggggaagatgttgaccaaggtggagaagaatcacgaaaaggagaagtcacagcacctagaaggcagcgcctcctcttcactctcctctgattagatgaaactgttaccttaccctaaacacagtatttctttttaacttttttatttgtaaactaataaaggtaatcacagccaccaacattccaagctaccctgggtacctttgtgcagtagaagctagtgagcatgtgagcaagcggtgtgcacacggagactcatcgttataatttactatctgccaagagtagaaagaaaggctggggatatttgggttggcttggttttgattttttgcttgtttgtttgttttgtactaaaacagtattatcttttgaatatcgtagggacataagtatatacatgttatccaatcaagatggctagaatggtgcctttctgagtgtctaaaacttgacacccctggtaaatctttcaacacacttccactgcctgcgtaatgaagttttgattcatttttaaccactggaatttttcaatgccgtcattttcagttagatgattttgcactttgagattaaaatgccatgtctatttgattagtcttatttttttatttttacaggcttatcagtctcactgttggctgtcattgtgacaaagtcaaataaacccccaaggacgacacacagtatggatcacatattgtttgacattaagcttttgccagaaaatgttgcatgtgttttacctcgacttgctaaaatcgattagcagaaaggcatggctaataatgttggtggtgaaaataaataaataagtaaacaaaatgaagattgcctgctctctctgtgcctagcctcaaagcgttcatcatacatcatacctttaagattgctatattttgggttattttcttgacaggagaaaaagatctaaagatcttttattttcatcttttttggttttcttggcatgactaagaagcttaaatgttgataaaatatgactagttttgaatttacaccaagaacttctcaataaaagaaaatcatgaatgctccacaatttcaacataccacaagagaagttaatttcttaacattgtgttctatgattatttgtaagaccttcaccaagttctgatatcttttaaagacatagttcaaaattgcttttgaaaatctgtattcttgaaaatatccttgttgtgtattaggtttttaaataccagctaaaggattacctcactgagtcatcagtaccctcctattcagctccccaagatgatgtgtttttgcttaccctaagagaggttttcttcttatttttagataattcaagtgcttagataaattatgttttctttaagtgtttatggtaaactcttttaaagaaaatttaatatgttatagctgaatctttttggtaactttaaatctttatcatagactctgtacatatgttcaaattagctgcttgcctgatgtgtgtatcatcggtgggatgacagaacaaacatatttatgatcatgaataatgtgctttgtaaaaagatttcaagttattaggaagcatactctgttttttaatcatgtataatattccatgatacttttatagaacaattctggcttcaggaaagtctagaagcaatatttcttcaaataaaaggtgtttaaacttt

SEQ ID NO: 4 - DNA, 2994 bp, Homo sapiens
  ref <308>: DATABASE ACCESSION NUMBER: AB033006
ctcccactcgagctgcccccgccctctggacccgagtgactcaggcctttgtttgtccttcctggtagaggcgggttccctccctcggcaagatgccggagtgctgggatggggaacatgacatcgagacaccctacggccttctgcatgtagtgatccggggctcccccaaggggaaccgcccagccatcctcacctaccatgatgtgggcctcaaccacaaactatgcttcaacaccttcttcaacttcgaggacatgcaggagatcaccaagcactttgtggtgtgtcacgtggatgcccctggacaacaggtgggggcgtcgcagtttcctcaggggtaccagttcccctccatggagcagctggctgccatgctccccagcgtggtgcagcatttcgggttcaagtatgtgattggcatcggagtgggcgccggagcctatgtgctggccaagtttgcactcatcttccccgacctggtggaggggctggtgctggtgaacatcgaccccaatggcaaaggctggatagactgggctgccaccaagctctccggcctaactagcactttacccgacacggtgctctcccacctcttcagccaggaggagctggtgaacaacacagagttggtgcagagctaccggcagcagattgggaacgtggtgaaccaggccaacctgcagctcttctggaacatgtacaacagccgcagagacctggacattaaccggcctggaacggtgcccaatgccaagacgctccgctgccccgtgatgctggtggttggggataatgcacccgctgaggacggggtggtggagtgcaactccaaactggacccgaccactacaaccttcctgaagatggcagactctggagggctgccccaggtcacacagccagggaagctgactgaagccttcaaatacttcctgcaaggcatgggctacattgcgtacttgaaggaccgaaggctgagtggaggagcagtgccctcagccagcatgacccgcctggcacgctcccgcactgcatccctcaccagtgccagctcggtggatggcagccgcccacaggcctgcacccactcggagagcagcgaggggctgggccaggtcaaccacaccatggaggtgtcctgttgaagcccttgatcccgctgacgacgcccacgtcgaggccccaccgccatccttgcgccggctcatgttccctttagtttatttttgtgagggcaaaggggaggaaatggggttctgtttgaaaaaaatgaggggatcttagatgctgcagcagaacagtctccaggtgttttaaggggctcagtcctcctcatcccatctcactctccgtggtaacttagccaacttgacccctctcatcccactcccggcggcccaggcacagaagggcagggccatagggagggagattcgctacggatccaggtcattcctgggtgagcccttgggcaggcatgtttggagatgagagaggcttcgagagggtgggtgctgggccacaggggtgcggggccagctcaggcactggcgtgggagccctgggagaccccttcccccaccctccaccaagcacacctgtttctgtctcatagcacatgtgacaatcatctggacaacagccacaagggggcgctcggaccaggcagccactttcctggtgctctctgggcccagctggtgctgtagggccacgcaggcaggggcgtcaaggggtttctctgcccaaggaagacagaacatggagaaccgtcagggcaggaaccccacagactgtcccttccagcccacactctgccacctcctggccctgtcccaattctgagccaaggcctccccgaggcagaagttgcctggtcctctgtccccacagtgacctgactgggggtgagggagaaggaggagagagcccatgtgtggtgtgtgtgcccctgagaactttgtggtgactgcctttgggagcccgcaggtggccagaggcaggggtagctgagttcctggagaccccttttttgcccccaggttccccagagggcaacgccatcagtagcagtgtggtgtttcaggcagagctctggccaggctgtgccagtgtgtcccggacgcatcactaaggaagagagagtttatttagtcaactggcccaaggcagcgaggcttctacagtcccacaccccatagccgcctgggctggggcttactgggggctgaaggttctggacatgaacaagggtcaggtagaagagaaaggcttcccctacaccccagcctcctgctgtcccctgaagcccaggactgcgttgtatgctttccatccactcaccttaccccatagcatcttgcggcccagaaaccagagccatttgtctcagaccctaaatcaataatcacaaaccccaaaacgggagagagcagtgaaaacatgcagggctgtggacgggggaagggttgtggcgggtgttctgaggctgagaggacacctatatgcgtatttcctctacacacatcaccccccttctataatcttaagccatgactagcctggtggcgtgttagtttctgcccagttctaccccctcatgtgcttcttctgaatactgaatgtgactgtttgaaagctggtagaattcatccctcttactgtagataacactgcaaatcttggaattttgttttttgctgtttccagatgtatctataaatatctatacattatatgtgtgtgtgtgtgtgtgtgtgtgtgtgtgtgtgtacatcgggtcctcccatgtgtggtgttcttctggaggttgtctctttggtcaaggtgaacttttaatgtttattattttcttctccgcacaaagtaaagagcctaattttgtgtattctggtggctgctgtcatgagatgataaaatgtaaaacaaaactctagtcaacgtagaaagagttaactgtgctgaaaaactaataaagaacctaagaag

SEQ ID NO: 5 - DNA, 5776 bp, Homo sapiens
  ref <308>: DATABASE ACCESSION NUMBER: AB033025
gctcacccaggaaaaatatgcaatcgtcccattgatatacaggccactacaatggatggagttaacctcagcaccgaggttgtctacaaaaaaggccaggattataggtttgcttgctacgaccggggcagagcctgccggagctaccgtgtacggttcctctgtgggaagcctgtgaggcccaaactcacagtcaccattgacaccaatgtgaacagcaccattctgaacttggaggataatgtacagtcatggaaacctggagataccctggtcattgccagtactgattactccatgtaccaggcagaagagttccaggtgcttccctgcagatcctgcgcccccaaccaggtcaaagtggcagggaaaccaatgtacctgcacatcggggaggagatagacggcgtggacatgcgggcggaggttgggcttctgagccggaacatcatagtgatgggggagatggaggacaaatgctacccctacagaaaccacatctgcaatttctttgacttcgatacctttgggggccacatcaagtttgctctgggatttaaggcagcacacttggagggcacggagctgaagcatatgggacagcagctggtgggtcagtacccgattcacttccacctggccggtgatgtagacgaaaggggaggttatgacccacccacatacatcagggacctctccatccatcatacattctctcgctgcgtcacagtccatggctccaatggcttgttgatcaaggacgttgtgggctataactctttgggccactgcttcttcacggaagatgggccggaggaacgcaacacttttgaccactgtcttggcctccttgtcaagtctggaaccctcctcccctcggaccgtgacagcaagatgtgcaagatgatcacagaggactcctacccagggtacatccccaagcccaggcaagactgcaatgctgtgtccaccttctggatggccaatcccaacaacaacctcatcaactgtgccgctgcaggatctgaggaaactggattttggtttatttttcaccacgtaccaacgggcccctccgtgggaatgtactccccaggttattcagagcacattccactgggaaaattctataacaaccgagcacattccaactaccgggctggcatgatcatagacaacggagtcaaaaccaccgaggcctctgccaaggacaagcggccgttcctctcaatcatctctgccagatacagccctcaccaggacgccgacccgctgaagccccgggagccggccatcatcagacacttcattgcctacaagaaccaggaccacggggcctggctgcgcggcggggatgtgtggctggacagctgccggtttgctgacaatggcattggcctgaccctggccagtggtggaaccttcccgtatgacgacggctccaagcaagagataaagaacagcttgtttgttggcgagagtggcaacgtggggacggaaatgatggacaataggatctggggccctggcggcttggaccatagcggaaggaccctccctataggccagaattttccaattagaggaattcagttatatgatggccccatcaacatccaaaactgcactttccgaaagtttgtggccctggagggccggcacaccagcgccctggccttccgcctgaataatgcctggcagagctgcccccataacaacgtgaccggcattgcctttgaggacgttccgattacttccagagtgttcttcggagagcctgggccctggttcaaccagctggacatggatggggataagacatctgtgttccatgacgtcgacggctccgtgtccgagtaccctggctcctacctcacgaagaatgacaactggctggtccggcacccagactgcatcaatgttcccgactggagaggggccatttgcagtgggtgctatgcacagatgtacattcaagcctacaagaccagtaacctgcgaatgaagatcatcaagaatgacttccccagccaccctctttacctggagggggcgctcaccaggagcacccattaccagcaataccaaccggttgtcaccctgcagaagggctacaccatccactgggaccagacggcccccgccgaactcgccatctggctcatcaacttcaacaagggcgactggatccgagtggggctctgctacccgcgaggcaccacattctccatcctctcggatgttcacaatcgcctgctgaagcaaacgtccaagacgggcgtcttcgtgaggaccttgcagatggacaaagtggagcagagctaccctggcaggagccactactactgggacgaggactcagggctgttgttcctgaagctgaaagctcagaacgagagagagaagtttgctttctgctccatgaaaggctgtgagaggataaagattaaagctctgattccaaagaacgcaggcgtcagtgactgcacagccacagcttaccccaagttcaccgagagggctgtcgtagacgtgccgatgcccaagaagctctttggttctcagctgaaaacaaaggaccatttcttggaggtgaagatggagagttccaagcagcacttcttccacctctggaacgacttcgcttacattgaagtggatgggaagaagtaccccagttcggaggatggcatccaggtggtggtgattgacgggaaccaagggcgcgtggtgagccacacgagcttcaggaactccattctgcaaggcataccatggcagcttttcaactatgtggcgaccatccctgacaattccatagtgcttatggcatcaaagggaagatacgtctccagaggcccatggaccagagtgctggaaaagcttggggcagacaggggtctcaagttgaaagagcaaatggcattcgttggcttcaaaggcagcttccggcccatctgggtgacactggacactgaggatcacaaagccaaaatcttccaagttgtgcccatccctgtggtgaagaagaagaagttgtgaggacagctgccgcccggtgccacctcgtggtagactatgacggtgactcttggcagcagaccagtgggggatggctgggtcccccagcccctgccagcagctgcctgggaaggccgtgtttcagccctgatgggccaagggaaggctatcagagaccctggtgctgccacctgcccctactcaagtgtctacctggagcccctggggcggtgctggccaatgctggaaacattcactttcctgcagcctcttgggtgcttctctcctatctgtgcctcttcagtgggggtttggggaccatatcaggagacctgggttgtgctgacagcaaagatccactctggcaggagccctgacccagctaggaggtagtctggagggctggtcattcacagatccccatggtcttcagcagacaagtgagggtggtaaatgtaggagaaagagccttggccttaaggaaatctttactcctgtaagcaagagccaacctcacaggattaggagctggggtagaactggctatccttggggaagaggcaagccctgcctctggccgtgtccacctttcaggagactttgagtggcaggtttggacttggactagatgactctcaaaggcccttttagttctgagattccagaaatctgctgcatttcacatggtacctggaacccaacagttcatggatatccactgatatccatgatgctgggtgccccagcgcacacgggatggagaggtgagaactaatgcctagcttgaggggtctgcagtccagtagggcaggcagtcaggtccatgtgcactgcaatgccaggtggagaaatcacagagaggtaaaatggaggccagtgccatttcagaggggaggctcaggaaggcttcttgcttacaggaatgaaggctgggggcattttgctggggggagatgaggcagcctctggaatggctcagggattcagccctccctgccgctgcctgctgaagctggtgactacggggtcgccctttgctcacgtctctctggcccactcatgatggagaagtgtggtcagaggggagcaatgggctttgctgcttatgagcacagaggaattcagtccccaggcagccctgcctctgactccaagagggtgaagtccacagaagtgagctcctgccttagggcctcatttgctcttcatccagggaactgagcacagggggcctccaggagaccctagatgtgctcgtactccctcggcctgggatttcagagctggaaatatagaaaatatctagcccaaagccttcattttaacagatggggaaagtgagcccccaagatgggaaagaaccacacagctaagggagggcctggggagccccaccctagcccttgctgccacaccacattgcctcaacaaccggccccagagtgcccaggcactcctgaggtagcttctggaaatggggacaagtcccctcgaaggaaaggaaatgactagagtagaatgacagctagcagatctcttccctcctgctcccagcgcacacaaacccgccctccccttggtgttggcggtccctgtggccttcactttgttcactacctgtcagcccagcctgggtgcacagtagctgcaactccccattggtgctacctggctctcctgtctctgcagctctacaggtgaggcccagcagagggagtagggctcgccatgtttctggtgagccaatttggctgatcttgggtgtctgaacagctattgggtccaccccagtccctttcagctgctgcttaatgccctgctctctccctggcccaccttatagagagcccaaagagctcctgtaagagggagaactctatctgtggtttataatcttgcacgaggcaccagagtctccctgggtcttgtgatgaactacatttatcccctttcctgccccaaccacaaactctttccttcaaagagggcctgcctggctccctccacccaactgcacccatgagactcggtccaagagtccattccccaggtgggagccaactgtcagggaggtctttcccaccaaacatctttcagctgctgggaggtgaccatagggctctgcttttaaagatatggctgcttcaaaggccagagtcacaggaaggacttcttccagggagattagtggtgatggagaggagagttaaaatgacctcatgtccttcttgtccacggttttgttgagttttcactcttctaatgcaagggtctcacactgtgaaccacttaggatgtgatcactttcaggtggccaggaatgttgaatgtctttggctcagttcatttaaaaaagatatctatttgaaagttctcagagttgtacatatgtttcacagtacaggatctgtacataaaagtttctttcctaaaccattcaccaagagccaatatctaggcattttcttggtagcacaaattttcttattgcttagaaaattgtcctccttgttatttctgtttgtaagacttaagtgagttaggtctttaaggaaagcaacgctcctctgaaatgcttgtcttttttctgttgccgaaatagctggtcctttttcgggagttagatgtatagagtgtttgtatgtaaacatttcttgtaggcatcaccatgaacaaagatatattttctatttatttattatatgtgcacttcaagaagtcactgtcagagaaataaagaattgtcttaaatgtc

SEQ ID NO: 6 - DNA, 5072 bp, Homo sapiens
  ref <308>: DATABASE ACCESSION NUMBER: AB033058
ggggctgaggaggcgagggcagcggagtttcctgccctgagatagttgcagcccgctctgctgcaaccatttcaaattagagaagaaagcagttcagccggtggggctggcgggactctgaccggcccggtggcctcgccggcaacggccccgccccgctggcggcagcggcggcggcagcggctgcgcggggcctggaactggtcgggccggctggggttccgggggacaggtttgcagggtggggcccgagaggctggcgggcaggcagcagtggagccggaagggtaggcagccaggagagagagaggagctatggagagggcccgcaagttctcgggctccggcttggccatgggcttgggctccgcctccgcttcggcctggaggagggcttcgcagaggtgggcctggccgctccgctccctgcggcccggaggggatgccagagagcctcgcaagatcatcctgcacaaaggctccacaggcctgggcttcaacatcgtaggaggagaggatggagaaggcatttttgtctccttcatcctggcaggaggcccagctgacctgagtggggagctgcgcaggggagaccggatcttatcggtgaatggagtgaatctgaggaatgcaactcatgagcaggctgcagctgctctgaaacgggccggccagtcagtcaccattgtggcccagtacagacctgaagaatacagtcgctttgaatcgaagatacatgacttacgagaacaaatgatgaacagcagcatgagctctgggtctgggtccctccgaacaagtgaaaagaggtccttgtatgtcagggccctgtttgattatgatcggactcgggacagctgcctgccaagccaggggctcagcttctcttatggtgacattctgcatgtcattaatgcctctgatgatgagtggtggcaggcaaggctggtgaccccacacggagaaagtgagcagatcggtgtgatccccagtaagaagagggtggaaaagaaagaaagagctcgattgaaaactgtgaagttccatgccaggacggggatgattgagtctaacaggtcgatcaaaacgaaacgtaaaaagagtttccgcctctctcgaaagtttccattttacaagagcaaagaaaacatggcccaggagagcagcatacaggaacagggagtgacatccaacaccagtgacagcgaaagcagttccaaaggacaagaggatgctattttgtcatatgagccagtgacacggcaagaaattcactatgcaaggcctgtgatcatcctgggcccaatgaaggaccgagtcaatgatgacctgatctccgaatttccacataaatttggatcctgtgtgccacatactacccggcctcgacgtgataatgaggtggatggacaagactaccactttgtggtgtcccgagaacaaatggagaaagatattcaggacaacaagttcatcgaggcgggccaatttaatgataacctctatgggaccagcatccagtcagtgcgggcagttgcagagaggggcaagcactgcatcttagatgtttccggcaatgctatcaagagactgcagcaagcacaactttaccccattgccattttcatcaagcccaagtccattgaagcccttatggaaatgaaccgaaggcagacatatgaacaagcaaataagatctatgacaaagccatgaaactggagcaggaatttggagagtactttacagccattgtacagggtgactcactggaagagatttataacaaaatcaaacaaatcattgaggaccagtctgggcactacatttgggtcccatcccctgaaaaactctgaagaatcccctccaaccattctcttgtgaacagaagaaatcaagtccctcttccctcctccctcttcattcctgtccccatggggagaacaaatgctactgttcttgtccccttttttagatatgtcaaaaaaaattaagttttctagtcctgttctttttttttttttaagtttttgtttgtttcagtttattttttgggatgatgccatctcattcatcatgtgactgtgcccattcctgcatggacctttcccaagcgctagcacaggtgcaaaatccatcagagccattgttttcataaaaaccaagcagaagtgaagagaaaagaggaggactgatggaaagacagactctggacagctgcacggcttgtgaagtgagctaaatgcaccacatgatgagatgctcctgggcatttctccctatctgtactgctgtcttgcagctctgaacggtgcaacgtaatggcgacagaaagtatcttatttatatatagatatatatatgtaatttatataaaatatatagaaattattatatatatatattatacactctcatataatatatatatattcacacacatttgggttagaaaatctatggagacttcatcaatggtactatgttattagagaaatgctttaattttcatattccaatcagatggcatcttctatcccagctggttgggaagggattgaagatggtagcaagtgctgcactaagggcactcgcatttggtcattctcttgagagctaggaggggtcagcctgaggccggagaggaagggcttttgcctggggtgagagggtgagagacttgacctgaaagcagctgctgcccctgaggtgcagccagagtcctgtgtgcggacagagagaatggctaatgatgctccgcgtggaattgcctattgttttatgccacctgatgtgtctgcatgagaggtttcctttttgttcctttttaagctgctgttaaaccaaaaccatgttgtgctactgtgtcagccttttcattattgcaaattttacttttactatttaagtgaatgcatagaatccaatttgccaaggttctaaaggcttatgaggtcctgaaggagccaggccttgtgatggagtaggtgacacaggcctggttgtcctgtcagcagaagggaaagcaggggctgggctgagaggaggacacggagggctctgctgaggttccttcctgggttccaccaacagggacagggagtcacttgccttccagttctgtgctgggatggcgggacagcacttggcttgcttggccagctgcgtcatgagtttgatttggtttttttttttttgcagctgcttcatatgctctgctccagcccctccccaacagctggtagcttatggtttcttcaagaggaaagtagactttatgctgtacatttgagctgtagagctaagattcgcttactggtgagctgtgaaaccttgttgctttttcccagagtctgatggcagtgactgtgatcaagggaatcttcaccgccacaagtgcaggcagcaggtgtggttcaggtccccccccaccccactgtgctcctttgaagccaacgtgcctccctcgcctccatactggagggacgacgcaggggagaacagagaagtgcttggccctaggattgaggcacttgtttcctagcccgctgggttagggctggtgcaagcgaggcaatgttgaggatgctttaagcactaccagccgaatccgggaactctgttaacagttgtccaaccagcagaatgaggctaactgtataaagcatgggacccaggatgaggataaggaaaggacagcggctttccctgggcagtacaatggcttgaaggcaaaaagggataaagtgacagccgactgtgactctggtgaggaggggtgagcagggaggttgattctctgatgttaactaagtggcaaagtctcaaccgtgctcagccctccccctcccagggaagagaaacaaagattcaaagtaagcatgatactagtgggtttaccagtgtttcttccaaggagacatatattttttaataaacgatagttgcaatgaactgtggctcagagaccttcttaaagtagttgagaagggagggcgtgggcaaagcagtgggaagaacatcccaaacttttgggggccagagggctctctccttagtgatgatcagctagccgagctgggccgtcctggggatcggtacagctccctggggtggtgacaggccctttgtgaaagttgtgtgcttggtcttccaccccagccccagacactgcttcaaatagcaccaaccagatgggagtccacatctgtggtggcaaaatgctgacattttcccaagaggtacacaaggtgggagaggcctgctgtagcagaggtgtgtgttagagaaagcaggggcctgatttagtagcagagaactgggtgagaaaaatggccagagaaagtgacctgccagctaccagtgtttccgaaaatgagggtgggatgggcccatttgcagagcaggacagcagtcatccccatagccctctgaggaggggagggatgcttagagcaggcagttctgtcagttctgacgtggcaggtgccattgcaacttgtgcggaggagtcttaggaagtgctgtcataattcataaggtcaagagcaacatctggatgaatgagccacctgaaatgtgtgtgggctgagccacaggaagggtgagtcctcttgcttgtggtgctttatggtgtgcaggttgcttgctttcccacattctctcatttgcttgaaggcagcctaacaaaagggagtccccaaagagctccatgagagcttaagaaaattcatctcctgaggacaaagagaacaaagatctgtcctgtggtcacactgttgaggctctgtcttcacagctgatgttctcctagtggaggtacagctgaagaacattcagccccagcacgagaagatacagagcaacttggaaaccccaaagggagacacacccttaacactgccgtgctgtgctgtgccgtgtcctgaaggaggagagagccctatctcctcctggttttgttgctgacattgcagctgatcatgccttgactccttcatctctaacagaggaagaactgtattatcaaaccttatggtctacccatgaataaataaaatatttgttcaagcac

SEQ ID NO: 7 - DNA, 4777 bp, Homo sapiens
  ref <308>: DATABASE ACCESSION NUMBER: AB033090
cgaaaacccggagcagctgcgtacgctcatggacagtcctccgaggggcgaagccgggcagctgggcatgctcagtagctgggggaggtttgggtggagagtagaaagctgtggctctgcctctcatcccctcccgctggcccccgccccccttgcccctacccagccagtagtagttccccagcgtgcgcccggggagaccgggaacatggcgctgggagcgctgtagcagctgagaaggggctgaggcaccgccgcttcgctgacagccggccaccagatgttcatgcattctagagaaagtggaaaacttagaagcctaattaatgactgtcttctggacctctgagaccatgtttctagtgttttccgtggaatattatcagaaatacactgtggtgaaatgcttccacctcttgctaaaatgaacactgaggaaaaatgaagaagactgacaagcaccagcgaaaagttgcagaatagaaatagccacactcctctggagtctttaattcatccacagccatcatataaaggttttggcatcatgtttgggaagaaaaagaaaaagattgaaatatctggcccgtccaactttgaacacagggttcatactgggtttgatccacaagagcagaagtttaccggccttccccagcagtggcacagcctgttagcagatacggccaacaggccaaagcctatggtggacccttcatgcatcacacccatccagctggctcctatgaagacaatcgttagaggaaacaaaccctgcaaggaaacctccatcaacggcctgctagaggattttgacaacatctcggtgactcgctccaactccctaaggaaagaaagcccacccaccccagatcagggagcctccagccacggtccaggccacgcggaagaaaatggcttcatcaccttctcccagtattccagcgaatccgatactactgctgactacacgaccgaaaagtacagggagaagagtctctatggagatgatctggatccgtattatagaggcagccacgcagccaagcaaaatgggcacgtaatgaaaatgaagcacggggaggcctactattctgaggtgaagcctttgaaatccgattttgccagattttctgccgattatcactcacatttggactcactgagcaaaccaagtgaatacagtgacctcaagtgggagtatcagagagcctcgagtagctcccctctggattattcattccaattcacaccttctagaactgcagggaccagcgggtgctccaaggagagcctggcgtacagtgaaagtgaatggggacccagcctggatgactatgacaggaggccaaagtcttcgtacctgaatcagacaagccctcagcccaccatgcggcagaggtccaggtcaggctcgggactccaggaaccgatgatgccatttggagcaagtgcatttaaaacccatccccaaggacactcctacaactcctacacctaccctcgcttgtccgagcccacaatgtgcattccaaaggtggattacgatcgagcacagatggtcctcagccctccactgtcagggtctgacacctaccccaggggccctgccaaactacctcaaagtcaaagcaaatcgggctattcctcaagcagtcaccagtacccgtctgggtaccacaaagccaccttgtaccatcacccctccctgcagagcagttcgcagtacatctccacggcttcctacctgagctccctcagcctctcatccagcacctacccgccgcccagctggggctcctcctccgaccagcagccctccagggtgtcccatgaacagtttcgggcggccctgcagctggtggtcagcccaggagaccccagggaatacttggccaactttatcaaaatcggggaaggctcaaccggcatcgtatgcatcgccaccgagaaacacacagggaaacaagttgcagtgaagaaaatggacctccggaagcaacagagacgagaactgcttttcaatgaggtcgtgatcatgcgggattaccaccatgacaatgtggttgacatgtacagcagctaccttgtcggcgatgagctctgggtggtcatggagtttctagaaggtggtgccttgacagacattgtgactcacaccagaatgaatgaagaacagatagctactgtctgcctgtcagttctgagagctctctcctaccttcataaccaaggagtgattcacagggacataaaaagtgactccatcctcctgacaagcgatggccggataaagttgtctgattttggtttctgtgctcaagtttccaaagaggtgccgaagaggaaatcattggttggcactccctactggatggcccctgaggtgatttctaggctaccttatgggacagaggtggacatctggtccctcgggatcatggtgatagaaatgattgatggcgagcccccctacttcaatgagcctcccctccaggcgatgcggaggatccgggacagtttacctccaagagtgaaggacctacacaaggtttcttcagtgctccggggattcctagacttgatgttggtgagggagccctctcagagagcaacagcccaggaactcctcggacatccattcttaaaactagcaggtccaccgtcttgcatcgtccccctcatgagacaatacaggcatcactgagcagaggattcgtgtaggtggcaaagctagatgaggacatgagaataattcaggagaacaaaaggaaacacagaacatgcaaaaggcctgtgcattctagaccagccaattggtgggacagcgtgatgaccggcagggttcaacagaccagggcatcttcttgtgtcttaaacaggcatctctccactgacagccggtgtggtcacttggagcacggctttaataagtcattattatatttttcagcccttcatccagcaaatcagaaggactcagtacaaactccgttatgatatatcctagccacatgcagggtaacatgtaggattttctatattgaaagaatacttttctggcaaaaaaaaaaaaaaagaaagaaaggaaaacaaaaagcacttttttcttaatggtagcagtataatgtattttgcaacgaatttgtaatttttctgtacgatagttttgataatttatagtactttgatgtcatgtagccattgtatcagttgaagtaatacttgtttactagaggagtttgaacaaagcctttcctacttttttatccctttaagagaaccaatgattctttaggaactttgaatactgaatgactctcaatcaccgtcagctttagtaaaatctctttcttatcctaacaagtgtcttatttggtggaagaagaattaagagtgatggtgatggtgtgcacgtttcattaatccaaccaaaaataatgaaataaaatttgagccacagtataccactccttgggataaagttaaatatttttaaagatcacattttccatgaacgcctctagtagcaaaccattcttttgcacaccacaatgtttccctcagtgccctttctcaaatgggtacaatgttcccttgtggccaaatttccctcccagggagcaatttcagtgctaggatcattggattcagttcccaaaatagaatgtttcagtgagaccatgagaattccaggctcacaaagggagaggagagaacagggcaagacgtttggtttcatttgtcaccatttttaaaactctgtatgctagcacaccaaactcttgtctatatttacctttgtaccacagtattaatcgctattgttcatgtatcgtgctggaagtctgaactgactctagaggatgaattagcaagagggtattttaccaggtatgatctgacttcagttgtgcccatgttataatgtgtttccgacataggagagtcgtgctgctgtctagatcttcttgaatgttgataaaaatgaatgactactacaatacattttgtgttgcttgttggatgaatttgcatgttaactgtaggccaatatagatttgcctttaaaactctggaagagctacatagtcatcattagtttctattaattatgcatcagacaaaagccatttgttaccaaactgggaaaacagaggcttttcttaactatttcacatactgtaacaaatatgaatttaaatttgtgatagcgctctggttgctctaagcataattaagaatttttgtaattaataggttgctaattatttatcactgctaaaaaggaaaaaaggcataaaatgaccttctactgattagattttcagttttctttcaaactggaaatgcctccataaatatgatctatgattttgcttcataaaacagcaaatcaatgttttatgtaaaatattaaagcattaatataaatatgtgagaataaaaacaatctaaatccagaaaatggcagtcctaaatgttcatgagacagattgtattaatttaaccaggactatgtagaagtagaaagaaaagaaaaagaaaatcttttttaaaccagaataaacattaaaaactattgcagaaaatagtggattttggattccaaacattttcgacagtgtaatggaaatttttctgtaattttcttaccatcgggtattttttaaagtattcattgagtttaccaaaagttactgtagcttaaaaggttttgtgagcactaactattggcagaaactgcatttgcaaataaaaataaatgtttgccttt

SEQ ID NO: 8 - DNA, 5296 bp, Homo sapiens
  ref <308>: DATABASE ACCESSION NUMBER: AB033117
gcgcgagttgctgctaacgctcctcctccagcttcccacccccgccgcccgccgcggcccggtaccaacgggtggtctcgccgagggagctgtcgtgcctcgtggtcccgggactgcagtggtgtgcgctctcggcgcgtggcgctaggcatggcgatggatcaagtaaacgcgctgtgcgagcagctggtgaaagcggtgacggtcatgatggaccccaactccacccagcgctaccggctggaagccctcaagttttgtgaggagtttaaagaaaagtgtcctatctgtgtcccctgtggcttgaggttggctgagaaaacacaagttgccatcgtcagacattttggccttcagatcctggaacacgttgtcaagtttcggtggaacggcatgtctcgattggagaaggtgtatctgaagaacagtgtcatggagctgattgcaaatggaacattgaacattttggaagaggagaaccatattaaagatgctctgtctcgaattgtagtggaaatgatcaagcgagagtggccacagcattggcctgacatgctaatagaattggacactctttccaaacaaggggaaacacagacagaattggtgatgtttatccttttgcgactggcagaggatgtagtgacttttcagacacttccccctcaaagaagaagggacatccagcaaacattaacccagaacatggaaaggatcttcagttttctgcttaacacacttcaagaaaatgtaaacaagtatcagcaagtgaagacagatacttctcaggagtcaaaggcgcaagcaaactgtcgagtaggagttgcagcactgaatactctagcaggctatattgactgggtgtctatgagtcacatcactgctgaaaactgtaaactcctggagatactgtgtttgctgttgaatgaacaggaacttcagttgggagccgctgagtgtcttctcattgcagtcagcagaaaaggcaagttggaagaccggaagcccttgatggtcttatttggagatgttgccatgcattatatactctccgccgcacagactgctgatggaggaggtttggtagaaaaacactacgtctttctgaagaggctctgtcaggtgttgtgtgcgctgggcaatcagctgtgtgcattgctgggtgcagattctgatgtagaaacaccatcaaactttggaaaatacctggaatcttttcttgctttcacaacccatccaagtcagtttctacgctcttcaactcagatgacttggggagccctcttcaggcatgaaatcctgtcccgtgatcctttgctattagcaataataccaaaatatcttcgtgcttccatgactaacttggtcaagatgggctttccttctaaaacagacagccctagctgtgaatattctcggtttgattttgatagcgatgaggacttcaatgctttcttcaactcctcccgagcacaacaaggagaggtgatgaggttggcatgtcgtttggatcccaaaactagcttccagatggctggggagtggctaaagtatcaactatcaacttttcttgatgctggttctgtgaattcttgttctgcagttggaactggagaaggaagcctctgttccgtcttctcaccttcattcgtgcagtgggaagccatgactctttttttggaaagtgttatcacccagatgtttcgaacactaaatagagaagaaattcctgttaatgatggaatagagctattgcagatggttctgaactttgataccaaggatcccctcatcctgtcctgcgtccttactaatgtctctgcactctttccatttgtcacctacagaccagagttcctgccccaggtcttctctaagctattttcatctgtcacttttgaaactgttgaagaaagtaaggcccccagaacccgggcagtgaggaatgtgaggaggcatgcttgttcctccatcatcaagatgtgtcgtgactacccccagcttgtgctgcccaattttgacatgctttataaccatgtgaagcaactcctctccaatgagctactcctgacacaaatggagaagtgtgccctcatggaagccctggttctcattagcaaccaatttaagaactacgagcgtcagaaggtgttcctagaggagctgatggcaccagtggccagcatctggctttctcaagacatgcacagagtgctgtcagatgttgatgctttcattgtgtatgtgggtacagatcagaagagctgtgacccaggcctggaggatccgtgtggcttaaaccgtgcacgaatgagcttttgtgtatacagcattctgggtgtggtgaaacgaacttgctggcccactgacctagaagaggccaaagctgggggatttgtggtgggttatacatccagtggaaatccaatcttccgtaacccctgcacagagcagattctgaaacttcttgacaatttgcttgcgcttataagaacccacaatacattatatgcaccagaaatgctagccaaaatggcagagcctttcaccaaggctctggatatgcttgacgcggaaaaatctgctatattaggattacctcaacctctcttggaactcaatgactctcctgtcttcaaaaccgtcttggaaagaatgcagcgtttcttctctaccctctatgaaaactgttttcatatcctagggaaggcaggcccttccatgcagcaagacttctatactgtggaggaccttgctacccagcttctcagctcagcctttgtcaacttgaacaatattcctgactaccgactcagacccatgcttcgtgtctttgtaaagcctctggtgctcttctgtcccccagagcactatgaagccctggtatcccccatcctcggacctcttttcacctacctccatatgaggctttctcagaaatggcaagttatcaaccaaaggagcctgctgtgtggagaagatgaggctgcagatgaaaacccagagtctcaagagatgctggaggagcaactggtgaggatgttaacccgagaagtcatggacctaatcacggtttgctgtgtttcaaagaagggtgctgaccacagtagtgctcccccagcagatggagacgatgaagaaatgatggccacagaggtcaccccctcagctatggcagagcttacagacctgggcaaatgtctgatgaagcatgaggatgtttgtacagcgctattaattacagccttcaattccctggcctggaaagatactctgtcctgccagaggacaacctcacagctctgctggcctctcctcaaacaagtgctgtcagggacactgctcgcagatgcagttacgtggcttttcaccagtgtgctgaaaggcttacagatgcacgggcagcacgacgggtgcatggcttccctggtccatctggccttccagatatacgaggcactgcgccccaggtacctggagataagagctgtaatggagcaaatccctgaaatacagaaggactcactggaccagtttgactgcaagcttttaaacccctccctgcagaaagtggctgacaagcgccgaaaggaccaattcaaacgcctcattgctggttgcattgggaaacccttgggagagcagttccgaaaagaagttcacattaagaatcttccctcacttttcaaaaaaacaaagccaatgctggagacggaggtgctggacaatgatgggggtggcctggccaccatctttgaaccctgaatcaagcttttgggcatccttcctcggcctttcttgtcatctcttctttccctttgtagccgatctctaggcccttcttgcactgccacctcactttccaccactgtcagcctggaaagagatccaggtctggagctggagagaacaggccctgtgcaggaccagaagtaattatactaaagtatcaagaaagggagttagggcttaaactattctgtctagatgtcccagatagttcccattctacttggagatttggcttttccaagaaaagctagagcagagcagcccttctcccacaagccctcccacccccgtgcagccacatacctgtacagaatggtaactaagggtgctgtgcccaaccctgcgactagcaaggctcgcagcaagagcacagccctcaactacttgtgccagagtttctcttggaccactccaactcccactgagcccttttgctgctgggctggcaggaaactttccccactccctaaggggcatgtctgggttaggtgctaagtgctgaagagaacttggtcagttctctcaactttgctttgggcaagaatctggtcacctgatgggatccatggtacaggctactgctaaacttggcacagtatcaagtatagtacctccaaggaccagggctgggaagtctttagtgctaacatcccctttagagttcacacatcttgcccttccatgaatgacccctcagtctggcctccccagcctcaaggtccactcaggcacaagagccacagtaccctagatagtgtcacatgacaccgttgtcatccaaggataatacagaccaactaggctacatctgtgatgagcagctagcaaagccgctggtcttctcctaggactaagtccaggtgccttccacaatctcatggtctttcaggtccctggttacttttctcaaaggccatttccaaaagaatacatgccttcacatcacaacctgtactgtgagtccattctagaggtcactgaaaggccctgtaaagagaggacatggatacgggacctggccctgaggttattactggccgtaaggcagagttaatccatacagaaaccagtgtgtccatgtgctctgcacaaaaacagacctgttgtccatccagtccactgacaagagggtttccccgagagccgaagtggactgaagctacagtttttagctggtgcgggccacaggcagggtcagattgagaagaagcaaagctggggaagcagaagttgggagtcttgtgttgctccctcttcctgtgtggtgctctgggtttctgtggatcgtgaaggcgatctcaagagtgtttccctccaaacctgatagctgcctattcctgtctggttggggctgtggaggatgtagttgtatttattgcattgtaatatttttaacatcctgtgacttcatgctagaaattttctattgtttatagaaactttttgtagaaacattaactctaaagcacatctgcatgtcagtaaaaatctcagtttcgtacag

SEQ ID NO: 9 - DNA, 5818 bp, Homo sapiens
  ref <308>: DATABASE ACCESSION NUMBER: AB037734
aagcgagacaacaaagagatccggacctacaactgcagaattgctgagtactcctatgggcatcaaaagaaatcaagcaagaagaaaaaaatcagtaagaatgacatccgcctggtaccccgggatgtggaggagacagacaagatgaacgttgtcagttgctcttccctgacctcctccctcaactattttgactaccaccagcagacgctgcccctgggctgccgccgctctgagagcactttcctgaatgtggagaaccagaatacccgcaacaccagtgctaaccacatctaccatcactctttcaacagccaggggccccagcagcctgacctgattatcaacggtgtgcctctgcctgagactgaaaactattcttttgactccaactacgtgaatagccgagcccatttaatcaagagcagctccaccttcaaggacttagagggcaacagcctgaaggatagtggacatgaggagagtgaccaaactgacagtgagcatgatgtccagcggagcctgtattgtgatactgctgtcaacgatgtgctgaacaccagtgtgacctccatgggatctcagatgcctgatcatgatcagaatgaaggatttcattgccgggaagaatgccggattcttggccactctgacaggtgctggatgccccggaaccccatgcccatccgttccaagtcccctgagcatgtgaggaacatcatcgcgctgtctattgaagctactgctgctgatgtcgaggcttatgacgactgcggccccaccaaacggactttcgcaacctttgggaaagatgtcagcgaccacccggctgaggagaggcctaccctgaaaggcaagaggactgtcgatgtgaccatctgcagccccaaggtcaacagcgttatccgggaggcaggcaatggctgtgaggcgattagccctgtcacctcccccctccacctcaagagctctctgcccaccaagccttccgtgtcttacaccattgccctggctcccccagcccgtgatctggagcagtatgtcaacaatgtcaacaatggccctactcgtccctctgaagctgagccccgtggagctgatagcgagaaagtcatgcatgaggtcagccccattctgaaggaaggtcgcaacaaagagtcccctggtgtgaagcgtctgaaggatatcgttctctaaaccagtctccaggaagaagagaaagaaaccacactggctagtgaagaagcaggagcttcttgttttaattgctcaccaatggttggttcttgagtggctatatttcagagcttttcctaaatgtattgtttataggtgattatcattctgtgacagtcccttgtttcaacttgttcagttggagcaaattagctttggcttgagttgttcatggggccttgatgttggggaaacagagacaaattcagttgtgaaaagtattatgtattaagtgtttgaatttatatatttttctatgtcaaaattataatataaattaccattgtttgtggaggattacatttaaaaaagcaaaaagtgaaaaaaaaaaagctctggacacctttaataagctcgccactgttttttgtagtgtagacaagttaatggtcatttattgtgtactattcattgattcagtgatgtgaaattgagcccccaaaaggttgtttctgaagctcgagtacttcccaatgccgctactttgctgtggacacccctgctttaaaaacccttttgctagctgtgctattgttgtatttgatattgcaaattgctatgtgtgtggtgatggcaaaaggcttttaaaagttggtgttttctttttcttaaaaaaataataaaactacagacaaaaacaaagtgcaaacaactgagacagcaaatgaatgagcaacaccatgcatatagattgagtacttggagaatactcacgttttttaactcatgtagtgattgctcaccactttgcaaagtatttttcctgcctttcagtggtctgcccaggtccatgatagatcattgcagaaagtcatttttggataggctgctatctaatttgcagttgtcagaaatactgtgctgaaagttttatgacatccatcttttaaattttcaggccctgaacaggaaagttgctcctgaagttatgtttccaggcttagaaattccctctctccaatcatctaaaattgaagatgactgaatctattttaagatctaaattagcatctcttcagacacacacttcctgattcagtgtttcccaatcatgattagaattagactgcaaagcacgtcatgggctgggattgagaactccatgttgctctgtatcttaggcttatatacgtagggatagagtaagcagtacaaagtgtatattttggaaaagacaggtaacaggtaacagcatcgctaatccaattactgtgccttctaaacggagacactcagacacttgaactcatctttttatgactaatagttttttgattaaaaatgtgaacaagaaaatactaaaataaaaatcctttcgatttagccaactctttttgctgtaggctaggaatacaccctttttaaattaacacactgtagatcctttttttctgttttaacattcctctaactcccccatttatcttttgtctattaatattcactagccaacatagtatttttgcagcctaagagttcattatttaaaaataaactaaagaaatatgtcacctttgttctgccttggtcttaagagagttgtttctagagaaacaagttttatggttctgttttcatttgtttcattttttgaaattcaggaatacacagagagaaggcctagaggttagagcactagaatgcaaaagaggatttattttcttaagtttaggtagataagtcagctcttttgaatgttttacttatttttgcctgagttcctagctttacgcattactaggaatattttcttttacaggagggagaagggttttgagggagggggtgggtaaggcagtagggatggggttaggtaggggagaacatttctgaaaaagaacttataatgaagctacaaatccatccttatttcttattcagtgctgaatactacctcatgcaaaatattggtgtggctgcaaatttccctctgaagctgacacaattaaggatgaattaccataacatcttcatttttcctcatttcattgcctctcatacagttttctccctctgatttatttcattttggtagtggattttgaattaagtatttatttctctttgcaagtgactatttgattaacacattaaaaattttttaaaaatttcccctttaagttatgatggctgcctatagaatttagactgtttctcaccctgatccatcctgatattatgttattagctacgatttcaaggtcactttgaagtcagacttcacagttttctacaggtgtatttcttgctatgctcagtgggaaccagggagcagaaaagattgtggaaagtgggaacattaattgtcacgtggctgttgagccagagaggccactggctgccatgcctcttaccagccaagttttaaatggttagagtggcattggcattgattttgcttttctcttgggttttcttcatttcttttcataattcatcttcaagctatagatccatccttcttccctatccaaatactttgttctcagtgggcagtcagatttttttggcttccaaacctcactgagcatgttcagagaattcctctcattaaggaaatatttttccccacaattgtctgatgtatgagtcctctcagaagcacaagtgcatactaggaaggctttgtaaactggttttgtaggcaggctgtacctgcaaataggcattctgagcaaggatcctaaatttccctttggctcatgtcccccccgccccaccccaccttctcctttttggcatgtctggtgaaaagctacaaggttcacagggccaaatattctcccttttgttctctaaacatgttgcacacataaactcaagggagtgatttcggttcctaagtcctagggagttctattccatttattctgatgtcccttttaaggaggagttggtgttgaagtgtgacatgctttaatgataactgctttggcaattccccagacaggtatacttcttcatccaaaattgcacctaaggtgttcatttagacaaaattgttcgcttagtgatccactgatctctaatcagaaatatttttaaaaaatacaatttagatctctgaaaattggaaccactcaagagtatcatcttgatagtgttacttcagcatatgactgactgattttatgaagggagtttagctgacttttccctgtagccctatcatattaaaaacaaaaagtggtccacttgaagcagcaaggacaaagggcagtttagggagaggcagggtgaaggggatagctcgattgggcatccagagtggaaaaggattattattgtacataatagcagttctggctggaattccaatccactttctggggatcattttgatgttgaatgttcccccaaagcattctgacaagtttggtccacttggctctttaccccgggtaataagacccttattgactttgaaaaactggcataaatgagcttaagaaatccattgtatacagtcctagtgtttgccttcttggtaaaattacatttaaggatgtcatttcatgagtcaaattgtatctgctgacactgaagtgtattgagatgttgttctttagtttaagtatgtaacaaagtaatattcaaaggggatgtttgggggtggggctgggaccgggtggctttatattgataatgaaatattccagagcaaaacacattgtcctaatgaagttgttgcagctctcttcgttttcttgtgccgctggaattggcttgtgggtcacttgttgtgcaaaagtgaattaatttcaaataggaatcatattgcttttgtgaaacaaagaaaatttaccaccttgtctgatacatagattggaaggcgctcttggtaaagaataacccacaaacacctgatcttgattggaaagcattgtaggtcattagggaaaactgatgatgctgactgttgctccagctgtgttggcaattcaagatgaccttgttactaactgaaagttgctgtcaaccttagcaaacaaaccagctaacaccattacagcactggttaagtagatttttactggcactggctggcgttcagctgaggaaggctaggatacagactttaatgaccaagagccagactagctcgagctagaaatcagcaacaaatacctccttgtgctatttgaatgctaaggtattagttgcaataggcttacgccttcgctcctctagtgaggggaatgagcctgatgacactattactgtttacctgtcaaaccagggtggaaatttagagggatgcaagtacagtatgtctcattaagcagtctctgttgctgattatatgaagataaaattgttgtatatgctgatctgtatgttatgtacattttcacagtgattgaatcattgtaaaaagaaaaaagacaaaaaagaatcaccactgtctattttatgaagatgataaagcagctttattaaattattacagttatgtttcaaatggtgttatctgccacattgtttccttttatctggtggttctctgtttccccctttaaatgtgttttctctgcttcaaaaatttaatgcattttagtattaaaggctattatggaaaaag

SEQ ID NO: 10 - DNA, 4261 bp, Homo sapiens
  ref <308>: DATABASE ACCESSION NUMBER: AB037805
actcactgagccccaggcccaaggataatgatgtgttgtttcttggtagcataatttgtcacacgtacattttttcttcttcttctcttgcagaaagctctgctccctctctctctccctctctctttctctcttttctccctctcctacattttcttgctgttgctaattcatggtgatcaaatgatgtacgacaaaataaattgtaaagagtgactgcctggagttgggaaccagaaggtgttttccccctcccaaggagacagcaaacctttaaaaaggaaggacaattgatttttggggggagcttaagtgagccttgactttgcagctggttgagaacaggttggaggagggtttaaagccaggtgcaccgagtcagctcgccatgtccagatccggggacaggacctccaccttcgaccccagccacagcgacaacctgctgcacggcctcaacctgctgtggaggaagcagctgttttgcgacgtgaccctgacggcccagggccagcagttccattgccacaaggccgtgctggcctcctgctcgcagtacttccgatcgctcttctccagccacccccctctcgggggaggggtcggcggccaggacggcctgggggcccccaaggaccagcagcagccgccgcagcagcagccgtcacagcagcagcagccgccgccgcaggaggagcccgggactccttcttcctcccccgacgacaagctgctgaccagcccccgggccatcaacaacctggtgctgcagggctgctcgtccatcgggctgcgcctggtgctcgagtacctctacacggccaacgtgaccctgtccctggacacggtggaggaggtgctgtcggtcagcaagatcctgcacatcccccaggtcaccaagctctgcgtgcagttcctcaacgaccagatctcggtgcagaactacaagcaggtgtgcaagatcgccgcgctgcacggcctggaggagaccaagaagctggccaacaagtacctggtggaggatgtgctgctgctcaacttcgaggagatgcgcgccctgctggactcgctgccgccccccgtggagtcggagctggcgctcttccagatgtccgtgctgtggctggagcacgaccgcgagacccgcatgcagtatgcgcctgacctcatgaagcgcctccgcttcgccctcatcccggccccggagctggtggagcgggtccagtcagtggatttcatgcgaaccgacccggtctgccagaagctgctgctggacgccatgaactaccacctgatgcccttcaggcagcactgcaggcagagcctggccagcagaattcgctctaacaagaaaatgctgttattggttggagggctgcctcctggaccggaccggctccccagcaatttggttcagtattacgacgatgaaaagaagacatggaaaatactcacaattatgccatacaacagtgcccaccactgcgttgtggaggtggaaaacttcttgttcgtgttgggtggagaggaccagtggaatccgaatggaaaacacagtacaaattttgtcagccgatatgatcctcgatttaatagctggattcaacttccacccatgcaggaaagaagagccagtttctatgcatgtcggttggacaagcatttatacgtaattggtggaaggaatgaaactggctacttgtccagcgtggagtgctataacctagaaacgaatgaatggcgctatgtgtcctctttgccacagcctctggcggctcatgcgggagcagtgcacaatgggaaaatatacatttcagggggtgtacacaatggagaatatgtcccatggctatattgctatgacccagtaatggatgtctgggctcgaaaacaagatatgaacacaaaacgtgcaattcacactttggctgtaatgaatgatcgcttgtatgcaattggaggaaatcatttgaaaggtttctcccaccttgatgtaatgcttgtggaatgctatgacccaaaaggtgaccagtggaatatactccaaactcccattttggagggtcgaagtggccctggctgtgcagtgcttgatgacagcatttaccttgtgggaggctacagctggagtatgggggcctacaagtcatctacaatatgctattgtccagagaaaggaacctggacagaactcgaaggagatgtagcagaaccgttggcaggccctgcctgtgtgacagttattctgccctcttgtgtaccatacaacaaataacaccaggaaactctggaatgaacagtatcacattctaggaagcaatggcaggtgacatcactattataataggaacaatgcattctaatggtacaactgccaaaacccacccttggtttctgatgatttataagtaactacaaaagaaagagacctgttcttgaacagatactatgtctataactcagatcgcaccaaacttcctgtggtgacagactcttccatttcagactggttttaacttatcccagctttacaaaaactcttcatgtgaatcttaacttgcaaaaggagaaagataaaatacagaagactggccccagagagacctcagatcagtattgtgcattgtagtctacctgcatgtgatctatgttgacatttcggggatattgtgttcaagaatgattccaaatttgagccaccaaaatacactgcattacagaaattgccacttgattctgtactcttaacctttggctacttcacagactccattggcaacactgttattgaaaatcatgtaagattaaagagaggcattttcgtttctatacaacttcatttcatacaccttctgcccttacagcacctcatgggatcagaaaagagaaagatgttggctcttgtaataaatgctttctaccctataggttctaggctagacagagtcgtcatttctgtgtcctcaattttatctgaaagattaaaacaaaatatattatgtcactattcagttcatggaggtttgtgctttttcatattttgtgatatataagtagtgaacacacatgttatttacttcaaaagacaggattgacaaattcagtcaatactattttagagattctgttagatgatatgtctgacccaaatttaatccataataaaaaaaaatgggagattgttttcaggaattcagggatgaaaagaaagaataatttccattaagtagaattccagttgtctttctgtttctaaaacacagaacttacaagagccacaggagccaattatagcacctgacagaatacttctcctcttcctcaccttcgggtgcctctagacacttgacttacgatcgttattcccccaattcatcatattttgtttgttatcaccagagatgcctgaactcagttaagcgagcaattgctagttgtcttgaggagcatgaggaattcaggagcagaaggtcaggatagcatgagatagtctcaatgtggccaaccaaaaggacaaaactgacaggaatgcacattcgattttcaagccctccagagcttgaacaacaactttaggagtaaataaaagcctaaaatatattttaaccatccagagatggtgttgaatccttcaacaaatgtgtcattcaaaacagtaattagggaaatcccacagatgaaaaatgccttagtgataagctttcatggcagagcacgtcaagataaatgggtatactggaatccgatgccgtttctacagtaaagtgcaatcttcgttgtttttgtatttatttgtatgttcagatccaaaggatccgttgtaaaaatatatatatataaatatatgtatatccagtgcaatcaactgtcatttctttttccttaaaacatatgagtatatagaaagaaaagttacagtactctgtgggaaaatctcagctgacatcatgaatagaatgaggtctgcttcagaaccttttgttgtcaactgtcactgtttcttccaaaagtcacaatttgtacaagaacctttgctttccttagacttgttctgcattttattttttatttctcaccaaaataaaagcatttatgagaattataagtaaagctttctgtatttcagagagacataagttactagaaagtgaaaagtgaataaataagtcacagagaatgtaaattttgtacagtattagaatgtgtaaatgaagcttgcttggaaggggaaaactttaaataaaaactttatgtactaatt

SEQ ID NO: 11 - DNA, 5924 bp, Homo sapiens
  ref <308>: DATABASE ACCESSION NUMBER: AB040912
accaggactaggaggcagcggggagcgtgcctgcgtcgctcggagcggtgacagcaaggagcgcagcgcggaggccgggcggcaaggggagtttccagtcctcgataagtggagtccctgctctgcgctgcgccagcgccttccgcctgggcccgcggtgctagacacctgccgagtccgaagcgggagtcaggctgagccttcggcccccaagatctccaacctgagcatatgccagttgacatgggaacactgaggccagcaatttaaggatttcacatttgcttgcagtgaatgcgtaatcctggatctcttgttcgcaaatcgacagcctgaagccctctggaagcccaagactgctggaggtttttgaccagacaagccaacctttttcaaggtagctcagtggcatttctgagcaggggccaccctgacttcaccttggcccaccatgagggtcttcctgctttgtgcctacatactgctgctgatggtttcccagttgagggcagtcagctttcctgaagatgatgaaccccttaatactgtcgactatcactattcaaggcaatatccggtttttagaggacgcccttcaggcaatgaatcgcagcacaggctggactttcagctgatgttgaaaattcgagacacactttatattgctggcagggatcaagtttatacagtaaacttaaatgaaatgcccaaaacagaagtaatacccaacaagaaactgacatggcgatcaagacaacaggatcgagaaaactgtgctatgaaaggcaagcataaagatgaatgccacaactttatcaaagtatttgttccaagaaacgatgagatggtttttgtttgtggtaccaatgcattcaatcccatgtgtagatactacaggttgagtaccttagaatatgatggggaagaaattagtggcctggcaagatgcccatttgatgccagacaaaccaatgttgccctctttgctgatgggaagctgtattctgccacagtggctgacttcttggccagcgatgccgttatttatcgaagcatgggtgatggatctgcccttcgcacaataaaatatgattccaaatggataaaagagccacactttcttcatgccatagaatatggaaactatgtctatttcttctttcgagaaatcgctgtcgaacataataatttaggcaaggctgtgtattcccgcgtggcccgcatatgtaaaaacgacatgggtggttcccagcgggtcctggagaaacactggacttcatttctaaaggctcggctgaactgttctgtccctggagattcgtttttctactttgatgttctgcagtctattacagacataatacaaatcaatggcatccccactgtggtcggggtgtttaccacgcagctcaatagcatccctggttctgctgtctgtgcatttagcatggatgacattgaaaaagtattcaaaggacggtttaaggaacagaaaactccagattctgtttggacagcagttcccgaagacaaagtgccaaagccaaggcctggctgttgtgcaaaacacggccttgccgaagcttataaaacctccatcgatttcccggatgaaactctgtcattcatcaaatctcatcccctgatggactctgccgttccacccattgccgatgagccctggttcacaaagactcgggtcaggtacagactgacggccatctcagtggaccattcagccggaccctaccagaactacacagtcatctttgttggctctgaagctggcatggtacttaaagttctggcaaagaccagtcctttctctttgaacgacagcgtattactggaagagattgaagcctacaaccatgcaaagtgcagtgctgagaatgaggaagacaaaaaggtcatctcattacagttggataaagatcaccacgctttatatgtggcgttctctagctgcattatccgcatccccctcagtcgctgtgagcgttatggatcatgtaaaaagtcttgtattgcatctcgtgacccgtattgtggctggttaagccagggatcctgtggtagagtgaccccagggatgctgctgttaaccgaagacttctttgctttccataaccacagtgctgaaggatatgaacaagacacagaattcggcaacacagctcatctaggggactgccatggtgtacgatgggaagtccagtctggagagtccaaccagatggtccacatgaatgtcctcatcacctgtgtctttgctgcttttgttttgggggcattcattgcaggtgtggcagtatactgctatcgagacatgtttgttcggaaaaacagaaagatccataaagatgcagagtccgcccagtcatgcacagactccagtggaagttttgccaaactgaatggtctctttgacagccctgtcaaggaataccaacagaatattgattctcctaaactgtatagtaacctgctaaccagtcggaaagagctaccacccaatggagatactaaatccatggtaatggaccatcgagggcaacctccagagttggctgctcttcctactcctgagtctacacccgtgcttcaccagaagaccctgcaggccatgaagagccactcagaaaaggcccatggccatggagcttcaaggaaagaaacccctcagttttttccgtctagtccgccacctcattccccattaagtcatgggcatatccccagtgccattgttcttccaaatgctacccatgactacaacacgtctttctcaaactccaatgctcacaaagctgaaaagaagcttcaaaacattgatcaccctctcacaaagtcatccagtaagagagatcaccggcgttctgttgattccagaaataccctcaatgatctcctgaagcatctgaatgacccaaatagtaaccccaaagccatcatgggagacatccagatggcacaccagaacttaatgctggatcccatgggatcgatgtctgaggtcccacctaaagtccctaaccgggaggcatcgctatactcccctccttcaactctccccagaaatagcccaaccaagcgagtggatgtccccaccactcctggagtcccaatgacttctctggaaagacaaagaggttatcacaaaaattcctcccagaggcactctatatctgctatgcctaaaaacttaaactcaccaaatggtgttttgttatccagacagcctagtatgaaccgtggaggatatatgcccacccccactggggcgaaggtggactatattcagggaacaccagtgagtgttcatctgcagccttccctctccagacagagcagctacaccagtaatggcactcttcctaggacgggactaaagaggacgccgtccttaaaacctgacgtgccaccaaagccttcctttgttcctcaaaccccatctgtcagaccactgaacaaatacacatactaggcctcaagtgtgctattcccatgtggctttatcctgtccgtgttgttgagaggatgatgttgtaagggtaccttaaaacaagagactcgcttgtattttaagagaaccaagtggccaaagaaactctttctaactttggcaacatcagaacttgccacatgtagctactgcagcaaggcttctgtgtacttgcctgaaaacaaaggaaggtgctggtcattccatttcttttgtttgaagctaaagagatgtgtagctcacaggggctaccttaccagtataaagagctgataacagtactcagaagaatctgtgaacaaatacttgaaaatgggttcaatgtagactgccattatgtgtggtcttcccattaaatgtgaacattttaatatgtatgcattcaccttgcctcttgcacaaatgtcaaaaaaaagatggtaatatctcaaagaaatgaacttgtagattaccaagcagtttgctaaaaattcaatctttgacccaagctgtagcatttttttttcatgtgtggcatctttttcatgccaccaacaaacttgttgtgtgtgtgcgtgtgtgtgtgtgtgtgtgtgtgtgtgtgtgtgtgttctgtacccactaggatttgtttaggtgcccattgcatctttttgtgctatggagttgtttacattaagcatgaccgaacgagagacaatactatttcccacaggagtccattgggttcagctttgaaagaggaatagaatcgaggctcctttgaccatcaaaatgatgaactttacttatgtggtacccaatgccagaatgtaagagttgcaagtgattttgtgctgctattcattaaaacttgtattccagtcttgccagcttaaggagatcaagatattaagaggtatccttgatttattttccagtattcagtagtaaaattttcctgtccactgtgaatcaaagcctgagtcactctatttaaccttggacacactaataaggttttattttgattgtgttcgtttccccccccccaatagtaaaatttctcctcctttaactcctcctaccccccaaggtaagaaacaaaaaacaaacaaacaaacaaaaatagaagacaaaagaaagacatatgaaaggaattgtaattggcttaacagaaacagtctgtaaaaacctaacagtggtgcaatcatgttgtctgtgttgtgttatgtgagaattttctcctaagtcatgcaggtaatgacaatatactgtaaataccacatgtgagtttacctgaatctgtgcattttgtgccttattcatgagaatgatagaagtactaaaatctgtcaagtgttttcagtatagcacattatttactgagtgccagttgtaaatgtttttcaaccagcacctaaaaagactcttttcaaaaaatcacagaaacaacctaggacaattatttgttacataatccgacctcatagcagcattacattctttgccgtgataaacattccactcctgctttcctaaggatgaaacagtgataatgtgaactcaaatgaggtttcctgggtaatgtgacacctgcagaaactatagagcgtcatttatacgtagtttggcagaaaccacttacggctgatgatgcgcaaccctgctgactgtttcagttaatatgctgcacaccacacacttgtttagtgaaccaaatctagaaagtaccaaggcagaggtatgctcctgctgtaatcaggcaaatgagttcaactggatttcttttgacaatactgttggtacctattacttgggggaggacatgttgcagaagaccagatcatttttatacagaatgtgaaatactgatacagttattcttttttttaaagaacattgttttataaagaacgtgatttccagtgatctctggaagcgctaaagctaaaatttctgttcttgaaacacttcagctttgcaactaaaatattacagattaataataaattaaaccaaccaatgataaacactactcagtccaccaacaacaaacgtgtttgaattcaccttaccaatattaatcccagcgtgtgtaaaacagaacagtaactctatgtgaccccagataacattttgtaacattgtgcttccttgtagtttgtaatgtgagttcaatcagtatttatgttgaaatttctaacattaaatctagtctctatcctgttaatttaatttttaaatgctttatccatttgtgcaaaggtaaacgcagattgtatcttttttaatggtacggcataaaaagtaaccctcaagtgaagtgtctctatactgttttatagagtactttaacatgaatagataccttgtaaacttgtattgtggatgtgtaaataatatgtactttgggtttttaacaccgcatgtaaagtcaaaataaaatatacaaatcatt

SEQ ID NO: 12 - DNA, 2504 bp, Homo sapiens
  ref <308>: DATABASE ACCESSION NUMBER: AF007872
ggatttggaggagaagctgtttggacagcatctagccacggaagtgattttcaaggcgctgactggcttcaggaacaacaaaaatcccaagaaaccactgaccctttccttacacggctgggctggcacaggcaagaattttgtcagtcaaattgtggctgaaaatcttcacccaaaaggtctgaagagtaactttgtccacctgtttgtatcgactctgcacttccctcatgagcagaagataaaactgtaccaggaccagttacagaagtggatccgcggtaatgtgagtgcatgtgcgaactctgttttcatatttgacgagatggataaattgcaccccgggatcattgacgcaatcaagccgtttctagactactacgagcaggttgacggagtgtcttaccgcaaagccatcttcatctttctcagcaatgcaggcggggaccttataactaagacggctcttgacttttggcgggccggaagaaagagggaagacattcagctgaaggacctggaacctgtactgtctgtcggagtcttcaataataaacacagtggcctgtggcacagtggactgatcgacaaaaacctcattgattactttatccccttcctgcctttggagtacagacatgtgaaaatgtgtgtgagggccgagatgagggcccgtggttctgccatagatgaagacattgtcacaagagtggcagaggaaatgacgtttttccccagagacgagaaaatctactcagacaagggctgcaagactgtgcagtcgcggctggatttccactgagctcctatccagatggggtaggagacagctgggaggctccgcacgccagaggccttgcctttcagaagaaccctgaagaccgctttggggttttgcctgtttgcaccttagacttttgggtatagaatcttttttttgagaagaggtctcactccgtcatccaagctggagtgcagtggtgcaatcctcaactcactgcaacctccgctcccggtttgagtgattctcatgcctcagcctcccgagtagctgggattacaggcatgagccactgtgcccagctgggatatagaatctaagagttgattgtggaaaacacgtgaatctattgcgcgcatttgtcatttagcaagatggcagcagtccagctgttctttgcagctggagatgaacttttaaaaatccccttcacacttaatgtactgaccgagacagaagtacctgaaaacagctgtgcatggcaggcccggcaatagcttctgacccacagcacccgcgcctcagaagctacggtcacaactaaaggagtccagggacttgctgcaggctggggggcactgggtggttctcaccagcaggctgcggggcactgtgttctcattggccaaaaacatccttttgctctgtctcgttctttacacagagttcactgacttgaagtatactcagttaaaatcggggctggaggtgcagacggtgtctgaccggaggatgtggccgtgcccgccgagcactcttgatctgagctgacctgtgtgtgtgtgtgggggggggtggggccttcacctaagacctctgcagcagacctggacagacaggcccctcccgcctgtccatcgctctagctgctaatacagccctggctgtggaatccttcaccgtctcagctggtatcagccccagcctgccttggtgccatatctcagcttggatctctgctagagtccccccaaccatatatcatagagttgaatcacaatgagaccgttggctttgaatttgagtcgttggttcccatggtgagatgcttgttaagactttatacttgggtcaatctctcactttattttgtagaaccatttgaaatcctaggatgtgcttgttctggaaggatgacatgggcccagactgaacaagtcagcttgatgatcttaaatgatggaagtataggacgttgcttattttaaaacaagggaaggacacaaaatggaatgactgccttagtcctttctcagatactccttaaaacaattttttattgtttaaatttgtggtaatacatggtcacaaccgtggatcaaacaaggtcagtctaaagtggcaggtcctaggtgtgacctgataccaccaccctttgtggcagcaccgggctggactgccctgatccctgggacgtgagacttagcttccagccagtgtgaatcattgtatctgtctcataatcacagcacagctgcagacacaacaacgtgcagcattttttacataaaaatatggtagaattaatttatgacatggaaatgccttacgtggtatcacacttagtcttgaaaaaaacaccaaggtgacgtttaaaatttttagtacatatcctcaaattggagctaagttatacttcttttataaccttttgggcatctggtcgagagaagacaagattttctctatttacagtgaggcaataaatatgtttgccaccttt

SEQ ID NO: 13 - DNA, 2890 bp, Homo sapiens
  ref <308>: DATABASE ACCESSION NUMBER: AF016495
gtcgcagattcaaacaaatagcagcgaacagggaatgacagttccaccagaagacgattaagccacagcctctaattggaacggcatttgtacagtcagagactcttaccagacatctccaggaatctgtgagccattgtcaaaacgtccattttcatctggctgtgaaagtgaggaccacaacaggtaggtattggtagaaacaggagtcctcagagaagccccaagatgcagcctgagggagcagaaaagggaaaaagcttcaagcagagactggtcttgaagagcagcttagcgaaagaaaccctctctgagttcttgggcacgttcatcttgattgtccttggatgtggctgtgttgcccaagctattctcagtcgaggacgttttggaggggtcatcactatcaatgttggattttcaatggcagttgcaatggccatttatgtggctggcggtgtctctggtggtcacatcaacccagctgtgtctttagcaatgtgtctctttggacggatgaaatggttcaaattgccattttatgtgggagcccagttcttgggagcctttgtgggggctgcaaccgtctttggcatttactatgatggacttatgtcctttgctggtggaaaactgctgatcgtgggagaaaatgcaacagcacacatttttgcaacatacccagctccgtatctatctctggcgaacgcatttgcagatcaagtggtggccaccatgatactcctcataatcgtctttgccatttttgactccagaaacttgggagcccccagaggcctagagcccattgccatcggcctcctgattattgtcattgcttcctccctgggactgaacagtggctgtgccatgaacccagctcgagacctgagtcccagacttttcactgccttggcaggctgggggtttgaagtcttcagagctggaaacaacttctggtggattcctgtagtgggccctttggttggtgctgtcattggaggcctcatctatgttcttgtcattgaaatccaccatccagagcctgactcagtctttaaggcagaacaatctgaggacaaaccagagaaatatgaactcagtgtcatcatgtagtggcatgctcagctctggatttgcagtcagtttgggattctcttcagaaagatggcatctaagtgtctgtgttcttgtaagcctgaggtggaatccacccagttttgtctgctagccatatgggacatctaattggaaaagcatctgcataaaagtttggaaacaatgaccacttctctaccattgtcccccaccccaccccccagaataacgctgactgtcccctgaaacagccttctctcctgccctgtttatttcatcctcgatgggaattcttgctaggtaagcactaataactcggcatcttgacgatagtcccatttgggtggtttcagctgcactatctgtatgaaatggtgtcaccaaaacccttttcttcagtatcgacaaagattacattctgagtaccaaccaaaccctaaattgaaagacaaaactatggtttcagtcaacatattcatgaattagggagctaatgggttaagcttccagttcccgctatgctactggatttgtataaatactgatattctccaaacctagtggtgtagggagcaagagaatgcagctggaaggcacaaggggaggacattgtggcattcagaaactgcaggagacaagatgaatttgagaagccaaatggaatttttaatggaaaccatttatcagattaatctcttgctctcctgcattttagaggacaccaattaatttcctggtctttagtatataataacctaaaataccattgtaacctcagtcatgaaaaatacatcactctgtctttttagctcaaatgtattttcctaattgcccacttgagaacagacatttgacaagttatatcaacgactgtgcttgtccattattttacacatgccctagaagccaaaactgaaagccactggatcctggtctagctgaatcttcagagtgggaggtctccaaaaagatattaccttattgggcttaacaattcacaaggcactttcacacccattatctaatttaatcctcataatgactatgtgaggcaaatgccacattgcccatttttcagataaagaaacaaaatcttagggaagataagttgagttgtccaagagcacactgaaagttgaatgttatctaatgcattcctctacctttcagaagatcagtagctggctgagaatctttgccaaatcttccttgctagccagaagtggaattggcagcttctagaatatgtacacctctggacaaaatgttcctcaatcttaagatacaaagaccctcattgtctgggtctattcccacacttactgagtacagatgaaggaaagtggtagcaatttaatcataactttcatttgctgaaaaacattatgagaaggcctcccttcctaagccacctctggtcttgctaagtcttgatcttgcttcctgccagcaccaaacattacattcaggggatttcctctggctcagtcttttccccttgaagttctctaatagatgttacttttgacaaaagatcgcctatgagttacaagcaccaggggatgctctacatcaagggatgcaccttcagtcaaactgtcaaaaagcccagaattcccaaaggcattaggtttcccaactgctttgtgctgatatcagaacagcagaaattaaatgtgaaatgtttctgatgacttatgttctacaatctatggacatacgggatttttttttcttgctttgaagctacctggatatttcctatttgaaataaaattgttcggtcattgtt

SEQ ID NO: 14 - DNA, 1197 bp, Homo sapiens
  ref <308>: DATABASE ACCESSION NUMBER: AF025441
gggaagatggcggctcagccgctgcggcatcgctcacgttgtgcaacgccgccccggggggacttttgtggtggcactgagagggcgattgaccaagcttcttttacgacctccatggagtgggatacgcaggtggtgaaggggtcctcgccgctcggccccgcagggctgggggctgaggagccagccgccggcccgcagctgccgtcttggctgcagcctgagaggtgcgctgtgttccagtgcgcacagtgtcacgcagtgctcgccgactcggtgcacctcgcctgggacctgtcgcggtccctcggggccgtggtcttctccagagttacaaataacgtcgttttggaagcgcccttcctagttggcattgaaggttcactcaaaggcagtacttacaaccttttattctgtggttcttgtgggattcccgttggtttccatctgtattctacccatgctgccctggctgccttgagaggtcacttctgcctttccagtgacaaaatggtgtgctatctcttaaaaacaaaagccatagtaaatgcatcagagatggatattcaaaatgttcctctatcagaaaagattgcagagctgaaagagaagatagtgctaacgcacaatcgcttaaaatcactaatgaagattctgagtgaagtgactcctgaccagtccaagccagaaaactgatcctgtaccaaagcttgagtgtcaggttcaggctttattgctgtcttcaacaacaggtgctgcttagtcatttcttgaaaaagattggcttcaagaatggaggggaaatgcagtttctatttacctttaggctgattttccaaattatttgtgaagctgtttttagaagatgagagactaaggattcttctcttttatagctatttgccttaagaacttactttagattcttattgaattcataatacttatctctgaaaatgtctttgactgtaaatttaggaattaagatgcagagtcccatgtgtcctctgatctaaagttgcatggttggtctgaaaatagagttgggcttaatgttgacttctattactcctgcatggagcagttgttatgaatactaatacatcactttttaacttctgtaaaatacagatcataatattctataggtaatgtttaataaattgcctgaataataaaaaaaaaaaaaaaaaaaaa

SEQ ID NO: 15 - DNA, 1622 bp, Homo sapiens
  ref <308>: DATABASE ACCESSION NUMBER: AF052117
attagtcatagcctggctttatagaatccaggaggtccttttagctgaaacaagtggcttcaaaagggaacatgaaacagtgaaaagatagccaaaggtcagtgaaaccacagcatttctttctaatctggctgaggccatgggggggaatgaggggaaaatatgcttccgggccaaggtcaccgagggggaccttgggatttgtgtcctccccagtgcttagagtagagatacctgcaaattcatggcaaacagttggaagaattacttgactgaaacaacccaatcttactttctttcgtaagttgaacctctgatttattgtggggttcaggctctcctcaatagaaggccagagttggacaggtggactaaggtcaaggatgaggagtctgcagtggggactaccacagcaaactgccttccttccgtggagtcctaactcagccatgtggtccactcacccaggggcccgggggctcagacaaaccccatggggaacatgctgccatgctctgtctttcttgtaaacgtagttgggtagggatcccaagggtatttgctctctccaaatgcagaacttccatccactttatctggtgatctgatgaacagcatggggacgtggaggtgaaataagcatctttcagaataaggtttttttttttttcctcttccagaaccaaaggctttagacatttgtagaactttctggattccttctgaatcgggttttaacataaaaaaccatcaacacatcatgggaaaggagctctttcatgatatacatcacatgtttcttgctctcattgaggaaatgtgttgtacaaaagcaccaaataagggcaccctggaagtgacatgtgtgtttcttctaagtcgtttttagtgcatcccctgcgattgcatgatgctcatgtggcttttagggaaaggcagaatgtgctagaagtcgaagtcattcaatattcagtgcttactgttactttgaaccaggtaatctcagttctttattcagtccttcccaaagaccttacaaaggagatgtgtaaactgatagattttgagcctaataagtcacagaaatggaaaattttagagcagtttgtttcacttaggtgagaactgattactttaaattaccaacatgtgcaaattctacttagtattcattattagatgctaagctggaaaagatgagaaacccaaggagaactattgaattaccacataattgtaatattatgctttaattttgtatgggcagtgttctatcagactaagcttctagcctttgaaatgatttacatgaggagagagcctgtatatctgacttgggaaacattaagcagaccctattttcactggcgcggtaataactatttatttgctatcctagaggtgctgggaatgagcctacgtgcgactttgatgagatatattcacatttggtgttggaacgaccacatagcaaagtgttggtttttttttattgtaacactctgtgtaaacgttgacaccttattaaatattaaatgtctgaactctatttttaaaaataaaacaagcacagagtctgcaacaaacatgttaaaaaaaaaaaaaaaaaaaaaaaaaaaaaa

SEQ ID NO: 16 - DNA, 1380 bp, Homo sapiens
  ref <308>: DATABASE ACCESSION NUMBER: AF052162
gtcaaaggatatttatttataggcctttttttttttaatatagaatctgaggctgtttgggctttgacttaaatttccatcaggcctctctccagcaggtaatccctctccttccgctgggtcccctggggaggtgtgaactcaagggcctagccccaaaacactttttctgcttttcttaatccttttccagtcccctctttttttataaacgttggcagtttgatgtttctgtttcggcataacgtaatccatttcactgtagcctaaactccagtccgaggttggatattgttcaaatgagcagggcccgagctggaagcgcaaggcagccgccgccgtgccgctcctcccttgccctcaggccaggtccctgctggaagcggctgcatcttcctgtcagccctggtttccatggtgactggcgtcacgcagccacccgagtatggctgaccttcctgcagagagaggagccgcagtcttttgcttgtggaaggagacgctgggctgtgcggtgcggagggtgatgaggatgtctggtgacagccgtgcggacaccactcctctctgcagcactgcctcccagcgccagggtcgcgggcacatcccactgagagcgggggtcctgccccatcttagagtcaaaggcagaggggcttccaggccctggatggggtattttggtgtcacctgaagtccctctgacatcaccttgtttcatcattttttatgacagaattagaaacccatccttcaagcacaataatcatcacagacttgagtttgcttcctaaagcaaaggctccgggtttgtttggaaaatttttttgatttctgaaatgaattgatttttatatttggggcatctctatagaaagtgaccaccaaggccagtaagtacgggaaaaaatgtttactaacttcctcagagattcgtgatacgcgtttctccactgacagacatttaaaaacaaccttcagctccgtttcaatcaatcacctcgacttgttttttagcatggacactgccagcaggacagacagggatggagtaaaccgaagtcaatttcagggctcttggcgtgttggacacagaagaaatcctagtgcagcctttggtagctaacagtcactgattttataattggagaatgcgtaaagattcatttttcaaggagaagagcctgcaaatggccaatgaaggaggtaaataaactaagatattccgagggaagggacccaggccacctcccttccgcaggtctgcagatgaagggttttttgaatgaaatgccactgtgcattttcagaaaaaaaaatctctgataaacagactttgaatggaaaaaaaaaaaaaaaaaaaaaaaaaaaaaaaaaaaa

SEQ ID NO: 17 - DNA, 2097 bp, Homo sapiens
  ref <308>: DATABASE ACCESSION NUMBER: AF064200
aaaacaagcattgcattgcatcaggatgtctatgaaatggacttcagctcttctgctgatacagctgagctgttactttagctctgggagttgtggaaaggtgctggtgtggcccacagaattcagccactggatgaatataaagacaatcctggatgaacttgtccagagaggtcatgaggtgactgtattggcatcttcagcttccatttctttcgatcccaacagcccatctactcttaaatttgaagtttatcctgtatctttaactaaaactgagtttgaggatattatcaagcagctggttaagagatgggcagaacttccaaaagacacattttggtcatatttttcacaagtacaagaaatcatgtggacatttaatgacatacttagaaagttctgtaaggatatagtttcaaataagaaacttatgaagaaactacaggagtcaagatttgatgttgttcttgcagatgctgttttcccctttggtgagctgctggccgagttacttaaaataccctttgtctacagcctccgcttctctcctggctacgcaattgaaaagcatagtggaggacttctgttccctccttcctatgtgcctgttgttatgtcagaactaagtgaccaaatgactttcatagagagggtaaaaaatatgatctatgtgctttattttgaattttggttccaaatatttgacatgaagaagtgggatcagttctacagtgaagttctaggaagacccactacgttatctgagacaatggcaaaagctgacatatggcttattcgaaactactgggattttcaatttcctcacccactcttaccaaatgttgagttcgttggaggactccactgcaaacctgccaaacccctaccgaaggaaatggaagagtttgtccagagctctggagaaaatggtgttgtggtgttttctctggggtcgatggtcagtaacacgtcagaagaaagggccaatgtaattgcatcagcccttgccaagatcccacaaaaggttctgtggagatttgatgggaataaaccagatactttaggactcaatactcggctgtacaagtggataccccagaatgatcttcttggtcacccaaaaaccagagcttttataactcatggtggagccaatggcatctatgaggcaatctaccatggaatccctatggtgggcgttccattgtttgcagatcaacctgataacattgcacacatgaaggccaagggagcagctgttagtttggacttccacacaatgtcgagtacagacttactcaatgcactgaagacagtaattaatgatcctttatataaagagaatgctatgaaattatcaagaattcatcatgatcaaccagtgaagccccttgaaagagcagtcttctggattgaatttgtcatgcgccataaaggagccaagcaccttcgggttgcagcccacgacctcacctggttccagtaccactctttggatgtgactgggttcctgctggcctgtgtggcaactgtgatattcatcatcacaaaatgtctgttttgtgtctggaagtttgttagaacaggaaagaaggggaaaagagattaattacgtctgaggctggaagctgggaaacccaataaatgaactcctttagtttattacaacaagaagacgttgtgatacaagagattcctttcttcttgtgacaaaacatctttcaaaacttaccttgtcaagtcaaaatttgttttagtacctgtttaaccattagaaatatttcatgtcaaggaggaaaacattagggaaaacaaaaatgatataaagccatatgaggttatattgaaatgtattgagcttatattgaaatttattgttccaattcacaggttacatgaaaaaaaatttactaagcttaactacatgtcacacattgtacatggaaacaagaacattaagaagtccactgacagtatcagtactgttttgcaaatactcagcatactttggatccatttcatgcaggattgtgttgttttaactgttgttgaggaagctaataaataattaaattgtaaaaaaaaaaaaaaaaa

SEQ ID NO: 18 - DNA, 3005 bp, Homo sapiens
  ref <308>: DATABASE ACCESSION NUMBER: AF067972
gccgcggcaccagggcgcgcagccgggccggcccgaccccaccggccatacggtggagccatcgaagcccccacccacaggctgacagaggcaccgttcaccagagggctcaacaccgggatctatgtttaagttttaactctcgcctccaaagaccacgataattccttccccaaagcccagcagccccccagccccgcgcagccccagcctgcctcccggcgcccagatgcccgccatgccctccagcggccccggggacaccagcagctctgctgcggagcgggaggaggaccgaaaggacggagaggagcaggaggagccgcgtggcaaggaggagcgccaagagcccagcaccacggcacggaaggtggggcggcctgggaggaagcgcaagcaccccccggtggaaagcggtgacacgccaaaggaccctgcggtgatctccaagtccccatccatggcccaggactcaggcgcctcagagctattacccaatggggacttggagaagcggagtgagccccagccagaggaggggagccctgctggggggcagaagggcggggccccagcagagggagagggtgcagctgagaccctgcctgaagcctcaagagcagtggaaaatggctgctgcacccccaaggagggccgaggagcccctgcagaagcgggcaaagaacagaaggagaccaacatcgaatccatgaaaatggagggctcccggggccggctgcggggtggcttgggctgggagtccagcctccgtcagcggcccatgccgaggctcaccttccaggcgggggacccctactacatcagcaagcgcaagcgggacgagtggctggcacgctggaaaagggaggctgagaagaaagccaaggtcattgcaggaatgaatgctgtggaagaaaaccaggggcccggggagtctcagaaggtggaggaggccagccctcctgctgtgcagcagcccactgaccccgcatcccccactgtggctaccacgcctgagcccgtggggtccgatgctggggacaagaatgccaccaaagcaggcgatgacgagccagagtacgaggacggccggggctttggcattggggagctggtgtgggggaaactgcggggcttctcctggtggccaggccgcattgtgtcttggtggatgacgggccggagccgagcagctgaaggcacccgctgggtcatgtggttcggagacggcaaattctcagtggtgtgtgttgagaagctgatgccgctgagctcgttttgcagtgcgttccaccaggccacgtacaacaagcagcccatgtaccgcaaagccatctacgaggtcctgcaggtggccagcagccgcgcggggaagctgttcccggtgtgccacgacagcgatgagagtgacactgccaaggccgtggaggtgcagaacaagcccatgattgaatgggccctggggggcttccagccttctggccctaagggcctggagccaccagaagaagagaagaatccctacaaagaagtgtacacggacatgtgggtggaacctgaggcagctgcctacgcaccacctccaccagccaaaaagccccggaagagcacagcggagaagcccaaggtcaaggagattattgatgagcgcacaagagagcggctggtgtacgaggtgcggcagaagtgccggaacattgaggacatctgcatctcctgtgggagcctcaatgttaccctggaacaccccctcttcgttggaggaatgtgccaaaactgcaagaactgctttctggagtgtgcgtaccagtacgacgacgacggctaccagtcctactgcaccatctgctgtgggggccgtgaggtgctcatgtgcggaaacaacaactgctgcaggtgcttttgcgtggagtgtgtggacctcttggtggggccgggggctgcccaggcagccattaaggaagacccctggaactgctacatgtgcgggcacaagggtacctacgggctgctgcggcggcgagaggactggccctcccggctccagatgttcttcgctaataaccacgaccaggaatttgaccctccaaaggtttacccacctgtcccagctgagaagaggaagcccatccgggtgctgtctctctttgatggaatcgctacagggctcctggtgctgaaggacttgggcattcaggtggaccgctacattgcctcggaggtgtgtgaggactccatcacggtgggcatggtgcggcaccaggggaagatcatgtacgtcggggacgtccgcagcgtcacacagaagcatatccaggagtggggcccattcgatctggtgattgggggcagtccctgcaatgacctctccatcgtcaaccctgctcgcaagggcctctacgagggcactggccggctcttctttgagttctaccgcctcctgcatgatgcgcggcccaaggagggagatgatcgccccttcttctggctctttgagaatgtggtggccatgggcgttagtgacaagagggacatctcgcgatttctcgagtccaaccctgtgatgattgatgccaaagaagtgtcagctgcacacagggcccgctacttctggggtaaccttcccggtatgaacaggccgttggcatccactgtgaatgataagctggagctgcaggagtgtctggagcatggcaggatagccaagttcagcaaagtgaggaccattactacgaggtcaaactccataaagcagggcaaagaccagcattttcctgtcttcatgaatgagaaagaggacatcttatggtgcactgaaatggaaagggtatttggtttcccagtccactatactgacgtctccaacatgagccgcttggcgaggcagagactgctgggccggtcatggagcgtgccagtcatccgccacctcttcgctccgctgaaggagtattttgcgtgtgtgtaagggacatgggggcaaactgaggtagcgacacaaagtt

SEQ ID NO: 19 - DNA, 3058 bp, Homo sapiens
  ref <308>: DATABASE ACCESSION NUMBER: AF080158
gcccgcgttaagattcccgcattttaatgttttcaggggggtgtcatagccccgggtttggccgccccagccccgccttccccgccccggggagcccgcccccttccccgcgtccctgccgacagagttagcacgacatcagtatgagctggtcaccttccctgacaacgcagacatgtggggcctgggaaatgaaagagcgccttgggacagggggatttggaaatgtcatccgatggcacaatcaggaaacaggtgagcagattgccatcaagcagtgccggcaggagctcagcccccggaaccgagagcggtggtgcctggagatccagatcatgagaaggctgacccaccccaatgtggtggctgcccgagatgtccctgaggggatgcagaacttggcgcccaatgacctgcccctgctggccatggagtactgccaaggaggagatctccggaagtacctgaaccagtttgagaactgctgtggtctgcgggaaggtgccatcctcaccttgctgagtgacattgcctctgcgcttagataccttcatgaaaacagaatcatccatcgggatctaaagccagaaaacatcgtcctgcagcaaggagaacagaggttaatacacaaaattattgacctaggatatgccaaggagctggatcagggcagtctttgcacatcattcgtggggaccctgcagtacctggccccagagctactggagcagcagaagtacacagtgaccgtcgactactggagcttcggcaccctggcctttgagtgcatcacgggcttccggcccttcctccccaactggcagcccgtgcagtggcattcaaaagtgcggcagaagagtgaggtggacattgttgttagcgaagacttgaatggaacggtgaagttttcaagctctttaccctaccccaataatcttaacagtgtcctggctgagcgactggagaagtggctgcaactgatgctgatgtggcacccccgacagaggggcacggatcccacgtatgggcccaatggctgcttcaaggccctggatgacatcttaaacttaaagctggttcatatcttgaacatggtcacgggcaccatccacacctaccctgtgacagaggatgagagtctgcagagcttgaaggccagaatccaacaggacacgggcatcccagaggaggaccaggagctgctgcaggaagcgggcctggcgttgatccccgataagcctgccactcagtgtatttcagacggcaagttaaatgagggccacacattggacatggatcttgtttttctctttgacaacagtaaaatcacctatgagactcagatctccccacggccccaacctgaaagtgtcagctgtatccttcaagagcccaagaggaatctcgccttcttccagctgaggaaggtgtggggccaggtctggcacagcatccagaccctgaaggaagattgcaaccggctgcagcagggacagcgagccgccatgatgaatctcctccgaaacaacagctgcctctccaaaatgaagaattccatggcttccatgtctcagcagctcaaggccaagttggatttcttcaaaaccagcatccagattgacctggagaagtacagcgagcaaaccgagtttgggatcacatcagataaactgctgctggcctggagggaaatggagcaggctgtggagctctgtgggcgggagaacgaagtgaaactcctggtagaacggatgatggctctgcagaccgacattgtggacttacagaggagccccatgggccggaagcaggggggaacgctggacgacctagaggagcaagcaagggagctgtacaggagactaagggaaaaacctcgagaccagcgaactgagggtgacagtcaggaaatggtacggctgctgcttcaggcaattcagagcttcgagaagaaagtgcgagtgatctatacgcagctcagtaaaactgtggtttgcaagcagaaggcgctggaactgttgcccaaggtggaagaggtggtgagcttaatgaatgaggatgagaagactgttgtccggctgcaggagaagcggcagaaggagctctggaatctcctgaagattgcttgtagcaaggtccgtggtcctgtcagtggaagcccggatagcatgaatgcctctcgacttagccagcctgggcagctgatgtctcagccctccacggcctccaacagcttacctgagccagccaagaagagtgaagaactggtggctgaagcacataacctctgcaccctgctagaaaatgccatacaggacactgtgagggaacaagaccagagtttcacggccctagactggagctggttacagacggaagaagaagagcacagctgcctggagcaggcctcatgatgtggggggactcgaccccctgacatggggcagcccatagcaggccttgtgcagtggggggactcgaccccctgacatggggctgcctggagcaggccgcgtgacgtggggctgcctggccgcggctctcacatggtggttcctgctgcactgatggcccaggggtctctggtatccagatggagctctcgcttcctcagcagctgtgactttcacccaggacccaggacgcagccctccgtgggcactgccggcgccttgtctgcacactggaggtcctccattacagaggcccagcgcacatcgctggccccacaaacgttcaggggtacagccatggcagctccttcctctgccgtgagaaaagtgcttggagtacggtttgccacacacgtgactggacagtgtccaattcaaatctttcagggcagagtccgagcagcgcttggtgacagcctgtcctctcctgctctccaaaggccctgctccctgtcctctctcactttacagcttgtgtttcttctggattcagcttctcctaaacagacagtttaattatagttgcggcctggccccatcctcacttcctctttttatttcactgctgctaaaattgtgtttttacctacaaaaaaaaaaaaaaa

SEQ ID NO: 20 - DNA, 2527 bp, Homo sapiens
  Modified_base 1 ... 2527: n = a,c,g, or t
  ref <308>: DATABASE ACCESSION NUMBER: AF119666
ctcctctgctcctcgaagaaggccagggcggggctgccgcaagttttgacattttcgcagcggagacgcgcgcgggcactctcgggccgacggctgcggcggcggccgaccctccagagccccttagtcgcgccccggccctcccgctgcccggagtccggcggccacgaggcccagccgcgtcctcccgcgcttgctcgcccggcggccgcagccatgtcccgggggcccgaggaggtgaaccggctcacggagagcacctaccggaatgttatggaacagttcaatcctgggctgcgaaatttaataaacctggggaaaaattatgagaaagctgtaaacgctatgatcctggcaggaaaagcctactacgatggagtggccaagatcggtgagattgccactgggtcccccgtgtcaactgaactgggacatgtcctcatagagatttcaagtacccacaagaaactcaacgagagtcttgatgaaaattttaaaaaattccacaaagagattatccatgagctggagaagaagatagaacttgacgtgaaatatatgaacgcaactctaaaaagataccaaacagaacacaagaataaattagagtctttggagaaatcccaagctgagttgaagaagatcagaaggaaaagccaaggaagccgaaacgcactcaaatatgaacacaaagaaattgagtatgtggagaccgttacttctcgtcagagtgaaatccagaaattcattgcagatggttgcaaagaggctctgcttgaagagaagaggcgcttctgctttctggttgataagcactgtggctttgcaaaccacatacattattatcacttacagtctgcagaactactgaattccaagctgcctcggtggcaggagacctgtgttgatgccatcaaagtgccagagaaaatcatgaatatgatcgaagaaataaagaccccagcctctacccccgtgtctggaactcctcaggcttcacccatgatcgagagaagcaatgtggttaggaaagattacgacaccctttctaaatgctcaccaaagatgccccccgctccttcaggcagagcatataccagtcccttgatcgatatgtttaataacccagccacggctgccccgaattcacaaagggtaaataattcaacaggtacttccgaagatcccagtttacagcgatcagtttcggttgcaacgggactgaacatgatgaagaagcagaaagtgaagaccatcttcccgcacactgcgggctccaacaagaccttactcagctttgcacagggagatgtcatcacgctgctcatccccgaggagaaggatggctggctctatggagaacacgacgtgtccaaggcgaggggttggttcccgtcgtcgtacacgaagttgctggaagaaaatgagacagaagcagtgaccgtgcccacgccaagccccacaccagtgagaagcatcagcaccgtgaacttgtctgagaatagcagtgttgtcatccccccacccgactacttggaatgcctatccatgggggcagctgccgacaggagagcagattcggccaggacgacatccacctttaaggccccagcgtccaagcccgagaccgcggctcctaacgatgccaacgggactgcaaagccgccttttctcagcggagaaaacccctttgccactgtgaaactccgcccgactgtgacgaatgatcgctcagcacccatcattcgatgagaggacagccaaggactctcccgggcctctccggttctcccttgcggaatgatgggcgcatcctgtctgccacgtgctgacggtcgggaagcttcagtggagaggcctaactctaatgtcgcctgcttaagcaaatcatgcttctctgtttcacgtagttgggttgacaagtttctgcctttaagataaatgagtaatagtctaatgaccagctcagccatttaaaatattttcttcctattctgttcaagaaacagtaaacttggtttcaatctttactgtattttttaaatgaattttttccttaataacagccagaataagggatagtctatgctttcaggactggctttctgcacctgatatgaatgagaccagttttattttataaagcatgtgctcttaatagcattatgtctaaagaagatatcacgtaagtttgcatcttagcatgcaaatcataattttaagcaatataaattatgaaaatactatataaatgtaatttaacttaaaatgtttaagtgtagagcttccagagatggagaaacccccaccctccctccaaccacgccagagctgtagagtgctaagacgctttgcctgcccttatcacagccacacgtagcactcgacgaaatctcctccgagagctccttttcttggtagttaggagtcgccaacggattcgctgcacacggcccatccaggacacaggctggggcgttcggagtcacggctccttgtgttcttcantcagctagttgggccaaag

SEQ ID NO: 21 - DNA, 1823 bp, Homo sapiens
  Modified_base 1 ... 1823: n = a,c,g, or t
  ref <308>: DATABASE ACCESSION NUMBER: AF121255
atgcccatccagggccagccgtgcttctgcaaatacgcgcagggggcggacagcgtggagcccatgttccggcacctgaagaacacgtatgcgggcctgcagctggtggtggtcatcctgcccggcaagacgcccgtgtacgccgaggtcaagcgcgtgggagacacggtgctggggatggccacgcagtgcgtgcagatgaagaacgtgcagaggaccacgccacagaccctgtccaacctctggctgaagatcaacgtcaagctgggaggcgtgaacaacatcctgctgccccagggaaggccgccggtgttccaggagcccgtcatctttctgggagcagacgtcactcacccccccgccggggatgggaagaagccctccattgccgccgtggtggggagaatggacgcccaccccaatcgttactgcgccaccgtgcgcgtgcagcagcaccggcaggagatcatacaagacctggccgccatggtccgcgagctcctcatccagttctacaagtccacgcgcttcaagcccacccgcatcatcttctaccgcgacggtgtctctgaaggccagttccagcaggttctccaccacgagttgctggccatccgtgaggcctgtatcaagctagaaaaagactaccagcccgggatcaccttcatcgtggtgcagaagaggcaccacacccggctcttctgcactgacaagaacgagcgggttgggaaaagtggaaacattccagcaggcacgactgtggacacgaaaatcacccaccccaccgagttcgacttctacctgtgtagtcacgctggcatccaggggacaagcaggccttcgcactatcacgtcctctgggacgacaatcgtttctcctctgatgagctgcagatcctaacctaccagctgtgtcacacctacgtgcgctgcacacgctccgtgtccatcccagcgccagcatactacgctcacctggtggccttccgggccaggtaccacctggtggataaggaacatgacagtgctgaaggaagccatacctctgggcagagtaacgggcgagaccaccaagcactggccaaggcggtccaggttcaccaagacactctgcgcaccatgtactttgcttgacatgttttagtgtttagcgattgtgtaccgagtgggattcacgagaccagctacactcagaccaacagatggccagcccttccgtgacagccagcatcgaacatgagacgtcattgattttattagattctccgttttccagaatgccttccgtcccagatttcaacttggattttgactgcagactgtatgagaacccaatgtcataggaaatatggtttgctaaaatctataagctgcttattaaaacagagtcccgtgtgtcctaaaaatctcctaaaaccagtctatgaactcagggctttaaaacatttttaatttatttggtcattcaatttacttgtttttaatacatgattctctatgaaattgatgggctcaaactagctgtgaatcttctgagagtgaaagcaacacaaaacacaagtgtggttttaaagccttgaacattctgatgttgtcactaaagttgatttccaggcgatgctcgtgtgcccctggcgtggctcacccaagttcctcgactgagggccggtggccatncagaggcgtccgcaggtgccgtgttctgccagcaccgcccttcacccggcctgaactaaggagcagtgccagaaggtgggccccgtgtgtttacagcatttccaggtccagagaggttggcagacaagtgccattttaataaaaaa

SEQ ID NO: 22 - DNA, 1466 bp, Homo sapiens
  ref <308>: DATABASE ACCESSION NUMBER: AF131817
cctcgtgccatgttattttttttaaatgactttttagtttagaaagttctgatgagcaaataaatacatctatctacatgttggaagtccatctgccagcacacctgcttaaagtgaaatgaaagcacataaccaggctctgaatgggttatattttatcatggtgctcccagaatcctttgacctcactctgctttctagtctgcttgtgacactggacagtcctttcttacagagctattatatgttctaggctacgaagggttaaataatcccaaaaatgaggtatgtcatacccacacgtctttatctctagaagctgtgatgtatgtgaaacagcactgttattcttaacactagtgtgtaaaataaggattagtacagtacgtctcattactttttaattcagggcaccctgagtgaaaacaaatacaaaaaaaaatccctaactctgagctctatctctgattcctcttcctccttcccctcttcctcctcttcctctcctcctgttttgctacattctcctcagtggcaaaaagtttcactctacctctgacagcatgtatattgcaccagtagctaacaaaaactggtctagtcaaaccaaatgggcacaaaagaaccaggataccaaaagttaagctcatacagctgcaaaccatatcacttcttggtaacaatgcagacctcataaacctaaagaagagaaagaaaagaaaacttttgttactttccttttttgcttgtcacttatatacaggctatgtgagaatataatttgtaggtataacacattaagaaaaagttatcttcattggatagaattgaatggtggtcgctgataggaatagggcgtcctctagctcttatctctgtctcttactcttttctctttctctttttctctgtcatgagactgtgtgtgacagggccacctgtctttttttttttcttaaattttttttttttttttatgtgtaggtgcatgtcttggggatttaaaaatttcaaggctggtttacttatgcaaagcatgcctacgtctggaatacttagggaaagaaagcgactccatgttgtccgaattcctcaagggacagaaaaaaaattggagactgttgaaatgcagatttgaagtaatttttttaaaatattattttgggttctgcgacattgtgaaaaattaaagttgttgtgcaatacttaattcagacatgtaccacaagttaatggtagactaacactggggggtggggtctaggcatcatgcttttgtcagcatactcttgagcttttaagtctactatgtctgaactgtggtttcttgtttatccttttttccttagttggactgtaatgtatggtctgtcaacctgtgaatctttaaagtatgattcaggtattgttgtattctttactgtgtaataaaaaagttgaaaaaaaaaaaaaaaaaaaaaaaaaaa

SEQ ID NO: 23 - DNA, 3481 bp, Homo sapiens
  ref <308>: DATABASE ACCESSION NUMBER: AF154121
ccgccaggcgatcgcgctgatggcggcgctggcagcagcggccaagaaggtgtggagcgcgcggcggctgctggtgctgctgttcacgccgctcgcgctgctgccggtggtcttcgccctcccgcccaaggaaggccgctgcttgtttgtcatcctgctcatggcggtgtactggtgcacggaggccctgccgctctcagtgacggcgctgctgcccatcgtcctcttccccttcatgggcatcttgccctccaacaaggtctgcccccagtacttcctcgacaccaacttcctcttcctcagtgggctgatcatggccagcgccattgaggagtggaacctgcaccggcgaatcgccctcaagatcctgatgcttgttggagtccagccggccaggctcatcctggggatgatggtgaccacctcgttcttgtccatgtggctgagcaacaccgcctccactgccatgatgcttccaattgccaatgccatcctgaaaagtctctttggccagaaggaggttcgaaaggaccccagccaggagagtgaagagaacacagctgctgtgcggagaaacggctacacactgtgcccacggagatgcagtttctcgccaagcacagaagccaaagaccaccctggggagacagaggttccactggatctgccggctgactccaggaaggaggatgaatatcgtcggaacatctggaagggcttcctcatctccatcccctactcagccagtattgggggcacagccacactcacgggcacagcccctaacctcatcctgcttggccagctcaagagtttctttccgcagtgtgacgtggtgaatttcggctcctggttcattttcgccttccctcttatgctgttgttcctgttggcaggctggctctggatctccttcctgtacgggggactgagcttcaggggctggaggaagaataaatctgagataagaaccaatgcagaagatagggctcgagctgtaattcgggaagaataccagaacctggggcccatcaagtttgccgaacaggctgttttcatccttttctgcatgtttgccatcctcctcttcacccgggacccgaagttcatccctggctgggccagcctcttcaatcctgggtttctttctgatgctgtcaccggcgtggctattgtcaccatcttgttcttcttcccgtcccaaaggccctctctcaagtggtggtttgacttcaaagctcccaacacagagacagagcccttgctgacctggaagaaggcccaggagacagtgccctggaacatcatccttctcctgggagggggcttcgccatggccaaaggctgtgaggaatcggggctgtctgtatggattggtgggcagctgcaccccctggagaatgtgccccccgccctggctgtgctgctcatcactgtggtcatcgccttcttcactgagtttgccagcaacacggcgaccatcatcatcttcctgccggtcctggcagagctggccatccgcctgagagtgcaccccctgtatctgatgattccgggcacagtcggctgctcctttgccttcatgctcccggtctcaacgccccccaactccatcgccttcgcctctggacacttgctggtcaaagacatggtgcggacaggcctcctgatgaacctgatgggtgtcctgctgctcagtttggctatgaatacctgggcacagaccatcttccagctgggcaccttcccggactgggctgatatgtactcggtcaatgtcacagcattgccacccaccttggccaatgacacatttcggaccctctgagtccccctggaggactcccttgaggctgaaccctctcaaagggctgtcaccatcacctgctgctaggacactacaaaacaatcaaataattcttttctgtaatccaatatgcagcaagcaagggtgacctccagtggcccactcaagtccatgagccattatctaggatactttctctctctttcatgcagttcaaagcccaggtatctctcagatctgctgcctgagaaataagctcctttatcagttagctgttttatcattaggatacaagacagcccagtgtcatcaacagtgagcaaatctggcatggtgtttgtctcgtacagttgggataggaggccattcattcccatgggcacagctaacattatcccccagtgattactttcgattacactgaagagaccaccttgtctttaaagatcactttcctgggctgcaatgttccaacccagttgttccagctgttcacaaccagtgtgtgattttgcttagttggtgcccattctgcaccagttgttttacccctgccgataaccagcagtcagagattcttttttaatccttggagacagggaaagggacagatagctttccaaggacatgagattgtgcaaagcctctttgctgtttctctgggctcctgagcataccaggggaagttctagaaaccgcagctgacatctcgacccaagagatttaggattctcctgtttaatctgggtcagtttggccataattctggggtcaggccaggcctgggtcctgccttcccatggggtgactcatgacccctccagccaggactctcctacatgtggcccccataggcctctgtggctgcaaggcggtcagttgctgcttgtcccagcaggtggccttgatctctccatgccccaccttaagtggtaagcatgtttaattatcaaaggccccatttgtcaggggtgagagaaaagtcaaaagataaattggggccttgtaaaaggccagggtaaaatgtctcaggcaagcaaaagattgtccccttctgcatatgggtaaaactgagacgtccccgtgagcccgaggctggaagtggtgtctgccttcaagggttaatccctctttgttccaagcagaagcattcttggcatcccagtgaagagctcaggccctcaggaagtgtcttgcttgaatggaatggcccagcattagcccagtattggaaaagacaccagcccaggggccctgactcgtcacacttccctttcctaagcctctgagggtggagattcccctaggagcgcttggccagctgggaaggcagcgcccagctgcacttgttgttgatacagcataagtgaatcatgggcatttccctgagagcagtgggagaggccctctgagttggaagttgagctccacctcctttccaagtgagcactcagtgttgaatcacagttacaacccactggggctggtgggagatgcgttgtatgggactggaagcaagaggttcattcaaagagaaactcatgggatttgtaaccagatgaatcatgatttctaagacttctgatcaaaaatactgtgaaataaagaatgttaatcaactttggacctggaaaaaaaaaaaaaaaaaaaaaaaaaaaaaaaaaaaaaaaaaaa

SEQ ID NO: 24 - DNA, 1884 bp, Homo sapiens
  ref <308>: DATABASE ACCESSION NUMBER: AK000770
ttcaacctgaccctcaaggagatccacttcctcaagtggctggacatctactgcccccacgtccccttcattttcaaaggcgacgatgacgtcttcgtcaaccccaccaacctgctagaatttctggctgaccggcagccacaggaaaacctgttcgtgggcgatgtcctgcagcacgctcggcccattcgcaggaaagacaacaaatactacatcccgggggccctgtacggcaaggccagctatccgccgtatgcaggcggcggtggcttcctcatggccggcagcctggcccggcgcctgcaccatgcctgcgacaccctggagctctacccgatcgacgacgtctttctgggcatgtgcctggaggtgctgggcgtgcagcccacggcccacgagggcttcaagactttcggcatctcccggaaccgcaacagccggtttggccctggaagtggacattcctctattactgtgaagttttatttatgaagaatttggagggagaaggctccaggcttcaggagggggtggtgtcctccctggccctcctcccttccctcccctcattccagctgcctcccctcagcacccccacgcccctcacagcccagccccctccagagccctgccccaccgcaccctgcttctccagggcctagcagaccagcatctgccccggtgaagggatggatcagctgtgggggtgggtgcagaacgttgccacctcctacctcagcgggagtcacctaggaaagatggagggattgacactattttctcaataaaatgggactttttttttttttttttttttttttttttggtgtgaaacttcctgttcccagctgcatcagagagcctgtctggggccaaggttgccagagatttctgaagacacagcttgttccttgttcttggctggtgggtgcacaaggacttctggaagggatttagacggggctgagtgctaggattaaagtggggatgggagtacggcaacagaaaaacctgggagctagcaatgcacccagcccttgactgtgccctggtggacagccgagctgtggctctagcgtgagccagtgccttcctgtccctgccaagggtgaggccagagttggccccgaggctaatgtttcagtgggtgagattaggtcggccgtacagaggccggtgggctccctgacatcccttccaggcaacctgaaagcactgaaatagcttatggccctgtgccagggaccttggcccaagctgctgacctccagggtggggagggagctacccccaggagaagagtcactcagacagcagtatgagcaagccagccagcagctccgtgcctgcacccagctcaggggaatcccagggggttcagatgcccaggaaggaaaaggggacagcgctactgctatggaatgagaccaccacttctcctgttgtccttcccagcttctccccaacctccccttttccctagtttataagacaggagaaaagggagaaagcaaaaagctggaaagaaacagaagtaagataaatagctagacgaccttggcgccaccacctggccctggtggttaaaatgataataatattaacccctgaccaaaacgactggtgttatctgtaaatcccagacattgtgtgagaaagcaccgtaaaactttttgtcctattagctgatgtgtgtagcccccagtcacgttcctcacgcttacttgatctattatgaccctttcacgtggaccccttagagttgtaagctcttaaaagggctaggaatttctttttcggggagctcggctcttaagacgcgagtctgccgacgctcccggccgaataaaaacctcttccttctttaaaaaaaaaaaaaaaaaa

SEQ ID NO: 25 - DNA, 1411 bp, Homo sapiens
  ref <308>: DATABASE ACCESSION NUMBER: AK001166
aaacaaagagatgccacccctgtgtgatggctttggtacccgaacactgatggttcagacattttcccgttgcatcttgtgttccaaggatgaagtggacttggatgagttattagctgctagattggtaacgtttctgatggacaattaccaggaaattctgaaagtccctttggccttgcagacctctatagaggagcgtgtggctcatctacgaagagtccagataaaatacccaggagctgatatggatatcactttatctgctccatcattttgccgtcaaattagtccagaggaatttgaatatcaaagatcatatggctctcaggaacctctggcagccttgttggaggaagtcataacagatgccaaactctccaacaaagagaaaaagaagaaactgaagcagtttcagaaatcctatcctgaagtctatcaagaacgatttcctacaccagaaagtgcagcacttctgtttcctgaaaaacccaaaccgaaaccacagctgctaatgtgggcactaaagaagcctttccaaccatttcaaagaactagaagttttcgaatgtaataatacttccacagcaacaggtgctagagaccactgttgttgttttgagtgaatggtggttaggagaaagactttggtggtggaagaaagaaaagcataaaacaaagactactgaaatatagataaagattgccttagtttttaaaaatgtttggccattagtatttttataaaactcaatgctagttttaagtgtataaattggttaaaatttatgagtcaaatatatagtgataatgttaacatgtttgtaattgctacagaatttaagggtatttttatctctgtgctttctttttcatggtgtttattaaataattgtgtatatacatcctagctactgatatctttattatagccttaagacttaattttaagtcttaaaaatagcgtgtatacttgaataagaaagacactgggtactgttactgtgatgctattgacttagtagccaattatcatttctcctgtataaattccagtttttattgctgcacataaattttttaatgtcttatattgtgatagctatgtcttttattgcagatttattggatgttatgacagattttactaaagctagtgtttttataacatatatattagttgatgtttacctataagtggagtagattttcatctgcctgcaatggtataatttcagtcttagctaaaaatggaaagttgaactggataaattctttgggtacccttagacctctgattctaagtcaaatgcaaatgggttaaataaaatgagactacttcctttataaatatattttcatccttttgaaagtaagtgaaatgtaaataaacttattttttttaaaaatg

SEQ ID NO: 26 - DNA, 2463 bp, Homo sapiens
  ref <308>: DATABASE ACCESSION NUMBER: AK001560
cttctgggagcaagcctgcagcccggctcacctggagaaagggtgaccaagaactccacggagaaccaacccgcatacaggaagatcccaatggtaaaaccttcactgtcagcagctcggtgacattccaggttacccgggaggatgatggggcgagcatcgtgtgctctgtgaaccatgaatctctaaagggagctgacagatccacctctcaacgcattgaagttttatacacaccaactgcgatgattaggccagaccctccccatcctcgtgagggccagaagctgttgctacactgtgagggtcgcggcaatccagtcccccagcagtacctatgggagaaggagggcagtgtgccacccctgaagatgacccaggagagtgccctgatcttccctttcctcaacaagagtgacagtggcacctacggctgcacagccaccagcaacatgggcagctacaaggcctactacaccctcaatgttaatgaccccagtccggtgccctcctcctccagcacctaccacgccatcatcggtgggatcgtggctttcattgtcttcctgctgctcatcatgctcatcttcctcggccactacttgatccggcacaaaggaacctacctgacacatgaggcaaaaggctccgacgatgctccagacgcggacacggccatcatcaatgcagaaggcgggcagtcaggaggggacgacaagaaggaatatttcatctagaggcgcctgcccacttcctgcgccccccaggggccctgtggggactgctggggccgtcaccaacccggacttgtacagggaggcaggtgccaccttgacacctctcttccatagcaatgggaaagtgatgagtgcgggagtcctgaggagatgtggcctgcagacaacatgcagccatgcagggacccaggactgtaacctggggaggacgcgggtccctgcaaggaagagtagatttggagaggaaggatggaggtggactctcaccccattccccccgaaatgaacaaagccgggccctttccataggaactgcccttggagatagcagagtgtggctgcccctccttgctccagcagcagtgggagaggcactgctctggggcctgaactgcctctgcttcccccactgaggggcccctcactcttacccaagactctggattgttgcacggcaaccactcctcccatggcattgctcagcaactacttctcccttcccggccaccctgtgcccccttcctggtcccaacgccagcccttcatccttcctccctcagcagccaggcagacataacaacaaaactactaaaaggagcttcactgcagtgagctgtttcctgcccaaactaagggaataatgtgaactgtgtgcatgtgtgtggtgtgtatgcatgtgtgcatgtgtgtgtgtgtgtgtgcatgtgtgtgagtgagtgagaggcagagcgaggaactgaggaggagggctaagagccaggggtcctgggcaagtggacagggctgtgggacatgttggggaggctttgggaatggggtattcctagtcagggttcacacctcacctgggatgttgttccatgctggtatttcctctgccacccccaatgcccatcggtcttggagaaaggagtccccgggtgtgtgtttgcccagctgtccattctatctctcccttaaacacagagcattcagcccttccctggatttccctcctctgagccatggagtcagtgccacagcctttgttatgcacctctcaggcctctccctggcgttgaccctggaaagacctaccaccacctattttttcccatagtctgtacccagtgagttgaaggctgggtccccacccttccttttgatttcctgtcttccttctcgtggccccagctggttgctgtggagatgaggttcctggtcctccctgtcctggctggactgccccgcctcagatccaggatgcccttggcatcgctcccaccctcccccagcttttcctccctggtctgacaatgggcatgcaaaaaggggcagctgcaatctagcaggcctgcccacccccttcagttcaggtaatacagttgtgaatcttccagccgctggttagggccttgggcaccacaggcagcccctcacctaagccggggcctactcctcttacaacagcaagagagccctggggccccaggcctgttgagcttcttgtctcccagcacccgcttttgggaaaatgacttttcctcttcaagctgaaccactctgtccatattacacagaagccatatttgtacgggggggtgggagggagaggggctgttgtgctgtgtgtgtctgtccaggggtgggggggtgggggaagggagcagggaggggaccgtgtatctttataatctttctaactctcctgtgctaatctcagaggggtcaccctcaatatatctgg

SEQ ID NO: 27 - DNA, 2387 bp, Homo sapiens
  ref <308>: DATABASE ACCESSION NUMBER: AK002117
tgctgtaatgcaggctttgatctgtttcaccatggcttctattcaagtccagttaaaacctcccagctgacctcagactaggcatatttcaggctttaaattattctactttccaaactgaattctcctgcagtgccaagtatcaaaggtgtccttaaatacttgtagggatgaggttaggaatattcagttccaaaacaagatatcttctgtccgccttacatatagcagtgacacttgttgcctaactttatggtgacctcctattttgtaagggctgttagaagttctatctaagaaatggcattctgtaggtttatagaaggtttagccttcatattttaattgcttgtatacacaacagctgttttgcttttagatttctgtgtttctgaaggtaatgttcttcctgttttcaagtttacataaggatctttggtctgatgctgatgaagagttcacaggtggtatgggagagcaaaaggcaagctaatgctgtttaccgtgttttggtcaaacgtaacgagtgaaatagaatttgcctttctcatatttaattatcatgtagtttaatgtaccatatgtgaaacattctggccatagcagcaactaaaaactgcaagcaacttggtaacagaactttctaaataaacttaacctgttccagaatgtcatgtatttgacttttaagccctatctcagttggtcagtaaagaccaatccttactgtaggaaatcattgttgtatcatcacaaacatctatcttttgctgtcctgtccagtcccatcaactccacactgtgccatttgtggcatcgttttgtttatttggagtttgctaagggcagtatttttctgtcaagactattcaagaaggcattatttgagattcctgttcattcttggtgtgtctctaacagatacagtatgtatacatttgtataattgttgttgttgaaagtccagcttttttgaggtatattttaaatgttttaaggatgcttctaaggatcagtagtaatttttttagttcgcacctaaagatgattacattgacctcccccgactgcttaccaaattaaaatgtgtccacgaagtagctttgtgatcgcagatacattcatagtgaactcatcagaatggctggtttgcagtactgaaatactatcttctaggctgtatgtagtgctacaattagagaaacagaagtccaaggctggcgacagcttgaaaagtctgacagcttttctacttttcctgaaaattttaagactgtgatatctgtcattttactgtatagctgactgtgtactcaggtattttattggtccttgaaagattggtcgttatggatcacccagcctttccaagtcagtggctgttgttctgtcttgctgtctgatacgagagtggggcttttcagtgaactaaccagggattgttcttgacatacctgacttttctcacatttgaacttccactatcattgtatccatataacttctagcattttcatgccatggtaatccatgagctacacatacgtagcccggcaccgtgatgcaagttcatggtatcgtgcatgttcgtggtatcatggtatcattcatgcgtgtttgaatagttctacatctagtgcttcttgccaaaaagaatacattgtttaaattcacaaaattagcataattgcagtgctaatgaatatcggaatatgtgcacagtaacatttggactattcattggagagtttacccatacatttagcaaattgaatggccaaaacatttgactccagtgagggctcaagttagatccctatagaaagaggacacttcgtcttacttaagtcatagttaagatctgtgatacgaaccatagatattgcctgacaaagcagaaatcaccaagtttcccccttttgaattaccaccaagaagtgttgaaacaccaaatagatatcatgttattttgggcatttgcagttttcttccctgctgcatgtaatgtctcagaatcaacattcttttaaaatctagactatattttgaggcaatgaattacttatattcaacttaggcttgttttgacattcagtagaactttaagttcaatctaaaggcttcagtccacatttttttatacgttgtattttaaaaacgtttgaaaggagtcttacacctgtatcatgaaaactgaatccttttgaaataccactatatgaagagagagatgaaatttagtgaacagaattgaaaaggtgctcataatttcactatgcaaacttaccccagtctctaaaaaagtaatttagatttaaagttctttgatgtatttgattttctaaatctttatggttatgatttggaataaaatgtgcctaatcctg

SEQ ID NO: 28 - DNA, 1717 bp, Homo sapiens
  ref <308>: DATABASE ACCESSION NUMBER: AL049229
ttttttttttttttttttttttgagtcagagtctcactgtccctcaggctggagtgcaatggcgcaatcttgcctcactgcaacctccacctcccaggttcaagcgattctcctgcctcagcctcccaagtagctgggattacaggtgtgtgccaccacgccccaccgatttttgtacttttagtagagacaggatttcaccatgttggccaggctggtcttgaactcctgacctcaagtgatctgcccgcctgggcctcccaaagtgctgggattacaggcgggagccaccgtgcctggccaatgttaagtattttaaaagtcattttaaaatatttgtcattgatgaaacttggtttcagcacacgtaattgctttccctctcttcttgtgattaggtgtaaacctctatttaactcaagtcctagattagaatgtcctttgtcctgatgtttgcagtaattgcttccttggttaataaagatatttttgaaatatactctggactgttggtgaaagaggcaggcatggctttactggtactagtttggcactgaactgtttgggtgcccatgaggtaggcagaccttatgctttttttttttgagacggagtcttgctctgttgcccaggctggagtgcagtgatgtgatctcggctcactgcaacctctgcctcccaggttcaagtgattctcctgcctcagcttccccaatagctgggactacaggtgtgcgccaccactcccagctaatttttgtatttttagtagagacagggttttgccatgttggtcaggctggtctcggaactcctgacctcaggtgatccacccgcctctgcctcacaaagtgctgggattacaggcatgagctaccgtgcctggcctaaaccttacgcttttgaggttgagtgcaggccttgtgataactaagcgctacttttgacgagccttcaacaagctgcccagtcctctcctcagcagacgcatcaggttgtagttgcatctttacagtggtctttccttttattaaatctatagcagtgaatatagatttgattcaacttttagttacgttctctcaagaatcctaatcaactttcagttagcctcttaagaaagggaaaaaaaggtgctgccagtcatccccaaattatgtttttggctgtgcattctattttctacatagcactgaatctgagtaacagtcatcctggatttatagttggaacagaacagtaacagacctaactgggactcagccagcactagcctcatcttagctgccccttttctctgctttgcagtttactgcttccctgggctagccataacggggttctgggcaggtcagactcttcagcaagacagtgtattaatagtgtgaattagatacactgatgacctgctctgcctagttaagaaactgaattaatcagcagttacaaagcacatactttgttacgtgctaggctttgcctcctggcctctagataattaagacggcccagggaataccagcagagaagtgctaattgtatttgggtgttacaaaagcagacctagacgagctgttcacttaactggtacctgttggtcagaaaaagaatttatttagagattatgatcatgtaaaattacagtactcaacccttctagcaaagtatttttttgaaaaataaactaaatgcctttataaaaaaaaaaaaaaaaaaa

SEQ ID NO: 29 - DNA, 3165 bp, Homo sapiens
  ref <308>: DATABASE ACCESSION NUMBER: AL049685
ggtgaaggtgagactcatgagggaatacaaggtagtggtgttagggagtggaggggttggcaaatctgcccttactgtgcagtttgtcactgggactttcattgagaaatatgaccccaccattgaagatttctaccgcaaagagatcgaagtggactcttccccctccgtgctggaaattctggacaccgcaggaactgagcagtttgcctccatgagagatctctacatcaaaaacggccaaggtttcatcctggtttatagcctggttaatcaacagtcttttcaggatatcaagccaatgagagatcaaattgtcagagtgaagagatatgaaaaagtcccactaatcctagtaggaaataaagtggatctggaaccagaaagagaggttatgtcttcagaaggcagagctctggctcaagaatggggctgtcctttcatggagacatcggcaaaaagtaaatcaatggtggatgaactttttgctgagatcgtcaggcaaatgaactattcatccctgccggagaagcaagatcagtgttgtacaacttgtgtcgtccagtaaagaagataacctcaatcatggccataccgagcagataaaactcagaggaaatttgcacagatgctgctttggagaactttacaacctgggttgcagaactgagccttggtaaacctgtctctattacagcatgttgccatacatctatttaagtgcataaggtctttggccttcaagatccatcgaccttaaacaggaatgcttagcacgtttaccatacgtttaaaatccattctttatcaatcagtccttttatagctttctaagttcttattgatggctaatatacaagggttaatttttaatattttaattgatttctttaatcagtttctcgacttgtatttattaaatactcaaactcagtattacctactcaatgccttttaaaagaaagttataatggagaaaaaattgagccttaaacaaatggttacttctgtatattacctcgtaccagtgcttcatcctatttgtaaaatctttctcctttaaaattattggttaatactttgagactttgtttacgtgtggcagtgttgtaaaaagaaactaaagatcacattttacctgtatggatggaatatcccttttcttcaagtgcagtttgtgatgtgttttgtttttttttttttttttttgtaattaacatgttctgaaggttacaattgatatttgaaattgactgtagagcatttagttgaagagttaagcattcagttccattaggttttcacatgtgttaatctcatttacagcattgaattgcggcagtaacattttcctttctgtgaagttctaaatttagttatgacctatttagcaatgcctttgaaaagggatattgtatccatggtaaattaattgtatacctaaacagagatagctcatctttgcctatcaggcttgtaattgacatctagtagacttctgcacatgtaaaattgaattcaaataaaatcatacacactttctagttcttaatatttgtctttctgaataatagtttaaagcaatatttgttaaagttttcttgcactatcacaattgctttttagttatttctcaagaagcatgttcgtattagagacaaaatctgtgtaacaggagggagaatagcgccaagtctctgggctattttttatttttgcaaatgtgctttctaatagccattgccttccatgttgtttacctaatcagcatatttttgtctgaatacttgaacattttaacagtaacgcaggtgtagaatcagaaaggaaacttatgcagagtaatattttggttcagttttaacatcgtgacaatgagggctttttctagcaatgatttttaaattgtgtaagtttgacagtattttattgttgggtttttatttgattttagttgtgtgcttttcatttgcagaagttagtaactgcagctcacctactgcaccaaagttctcgattttaggagcccagctttagtcatttgaacatgcttctaaataaaataaaacaaaaccaaaactatacttttgatctataataagagctcaataactttgtcaaggaaagctctaatatatgcagtgatggtttatgaaagggtgtggcaattttaaatttatattgtgtgtgatgttcaaataaagtggtatctacattcatgtgatttatgggtcagcatgaccattaattactgagtagaaattgactaaactttgatttcctttttttaaatcgtgttgcatttgattcctgagcaaattccctcaaagtgaactcttgttcttaaattttgaattttatggtgagattgtaaagatagaggcaattgaaacattgttccttatttatgaactgcttgaagtgaatacttaatttaagtttgcactttaataccaaacttaaaaccaaacactcatttaaaagtaggttaagtgatcatggatcattgttattagctttgtggctttgtgaaattctaaaggaatcaaataattcatcatgatttaaattttctagagattttgatttttttataatgtttctttcctgtagattgtgttcttgtttctctctctctctctctctctctctctctctctctctctctctctctctctctctcaaaattacagtgttcattgtcattgacctcagcagcaaatttgacttgaattcacttaggatcgcaggaatcaggggaaagtgattttaaaggtggtttctccagcacattttaagaaaagggaccaaaagttattttagcttcctcaatagattgcatgttgcttattaggataataaattaatattaaatgcaatatatgtcttgtctttattatggcatctatttaggagttgttcaaatcactgcagtagggctctgcaaataaaataatgtaacctattatcatggatctaatgtactgtaactttatcagtgaaaggtaaaatctcaaataacaagtacaaacattgaacaattacctataaagatttgtaaaagtaaaatttttccaatagatttcattcttgtcattttgtaagacgaccctgcagtccacctgtttgtaacttttttaataaaatagacatctgtattactga

SEQ ID NO: 30 - DNA, 2758 bp, Homo sapiens
  ref <308>: DATABASE ACCESSION NUMBER: AL049949
gacaagccacagaacccctcttttctaaaatggagacaataatttcctacctcccaagggagcagagaggcctcgtggcacgtccgtggccagggagcccactgtcctggctggcggcgggatcgtgcgctcctctgtctcccggatgagaagccccgtttccatggtcttgacccttcctttctcccggctgtcagaactgggtctcttgattttgcccctacattatgcctctgtgggaaaaaaaaaaatcagaccaagaaatgagcctgaaattcagtgtttaccatggctcaaggatgcccatctggtgtccagttgccttttgtattcaaatgaaaatgctttgtacaactgaggagttacagtgaagtgttaaccaggggtccagggagcgagttgaaaagatggagtgagtgtatttgcagccagggagctgcagggtggatttgaggggccataccctctgagcacttaaaaaaggtatttgctccaggccaggcagcaggctgtggacacccttgccaccactggggactgccactgaggactccccgagcacgttgttccccgtcttctccaaggtgttgaggtgagctggggttggccccggcccaggcttctgtcccaaggagaagctgccactgacagtcatcctaccgcactgctaaagagaatgttcgcagtggtgggcggcgtgcctgtgccaacccttccagggacccggccatgggggaccttggcccaaggatgcctggggcctgccagctgtgctgcaaaggtggggggcccacaccctaaaactaacccaggccccagaccactggaggccagggcttccctgcacgggctaaggggtgttgggatatcaccccaaagtgaccttgccagtgagctgttcagcaggtagccactgccctgccatctgtgcagagccagccaccttgggggctggggttcccgctttgaggcccaccttccatactccccttgactcggctctggctgaactggggaactctcttgtggtcagcaaagcccctgccatgcaggccaggtgccattgagaattaagtgctcagagggccaggagcccaggggatgggaaagtgtgtggttttagtacgttcaaaagggacaatcgcttgcagttggtagatctagcgatctagttgggagataatggtgtttaccccatatgaagtattcaatagttctacttgtgaatttgtatttattttgagttatacttgacacagaattccttttttaaaaaaatatgtgtgtattttggaaaaaaaattcatagatgttaaaatttctgcatggttaccagtttttctcacgacactgaatttggtagcttttcccgaaaaaatcttcacagtaattttttgtctgtatatatttgagggcctttttttaaaaaaaaaaaagaaaagaaaaatataattgtttgatttttgagattaaaacaaacaaaaagagaggcattttcaaaatttcagaactttcaggagggcaagagaatatcaaacaaagatttctggaagtattttgccaaccttctggttgagctgcaagaaaatatttatggtgagaacttttctgtttcccgttattgggtttttggctggtttttgtttgttttttactatgctttggtctgtaaaaatatgcaactgaactacattcagaaggaaatattgtctacatagaatattatatgaagttggtacataattctgatgaggaaaaaaaatctttgcaattctttaagccatattgttgtttttctgtgttgttttccctggatgaaaatatcagtattaagtagacagcatattatccaagtgtttagacttattaatatgttcttgtcctgtatttatacatatgtgtattttggaaagtattgccttttttaagggaagctataattcgatacatagtgaaaaagggaatggtgacccctttgtgcctcttccactgaggataacaaacagcattgtaatccattctcttgcaccttcttcttcttatcttgttattacggttttattaattttgtagagggacagggagtgggcaaggggaagaagcagcttatttgactaaccagcccctctgtggtccaccagcgtcttggcttggtgggagggctctcaatcagcagggccccaggagggaagaagaagtggggcaaagcctggcctcgccgctcgggagctttgccatctgagccacgcctcctccaggccatgctccttgaacttggaaatgtcaaccggagcccttacaccagccctccagcatctaatagacttgaatctactctaaacgaatatttaatccaacctcactacattgtagctcagtccaacgactaaccctgaaatgggggtgttccagccttcagcgagatggccaagcggtcccctgggggctgtggcagcgggcttatccttctctgttgccaaccttgccgtccgacctcctccgcccccatgcggtgaccccgtccgtgtctgtgtctgtccatacgtgtgagtccagctaaaaagacaaaacagaacccgtgggcccagctcggaaggtgcgtggagaaggctccgacgtctccgaagtgcagcccttgggatggcattccgttgtgtgccttattcctggagaatctgtatacggctcgcctatagaaatatagcctcttcatgctgtattaaaaggacttttaaaagaaaaaaaaaaaaaaaaaaaa

SEQ ID NO: 31 - DNA, 1074 bp, Homo sapiens
  ref <308>: DATABASE ACCESSION NUMBER: AL050015
ggggggagctgcggaggcagccatggtcggggcgctgtgcggctgctggttccgcctgggcggggcccgcccgctcatcccgttgggcccgactgtggtacagacctccatgagccggtcccaggtagccctgctgggcctgagtctgctgctcatgctcctactgtatgtggggctgccaggcccccctgagcagacttcctgcctctggggagaccccaatgtcacagtcctggctggtctcacccctggcaactcgcccatcttttaccgcgaggtgctcccactcaaccaggcacacagggtggaggtgtgctgcttcatggaaaggcctttaactctcacacgtgggagcagctgggcacactgcagctactgtcacagaggggctaccgggccgtggcccttgaccttccaggttttgggaactcggcaccttcaaaggaggcaagcacagaggcagggcgggcagcgctgctggagcgggcgctgcggaacctggaggtacagaatgccgtgttggtgagcccctcgctgagtggccactatgccctgcccttcctgatgcgaggccaccaccagctacatggatttgtgcccatcgctcccacctccacccagaactacacccaggagcaattctgggctgtgaagactccaacccttatcctgtatggagagctggaccacatcctggctcgagagtcactgcggcagctccgccacctgcccaaccactctgtggtgaagctacgcaatgcaggccatgcctgttacctccacaagccgcaagacttccaccttgtcctgcttgccttccttgaccatctaccttgaactaacccactcccagctcccagcctggcatgagcttggacagtctggaccgccaccctccctgaaccagggagacagcctctgggattggaggccagaggccagggtcagacccagccaggactcctcatttcatctcacagacacaataaaaaagcatatttgtcctgcctgggaaaaaaaaaaaaaaaaaaaaaaaaaaaaaaaaaaaaaaaaaaagaaaaaaaaaaaaaaaaa

SEQ ID NO: 32 - DNA, 3104 bp, Homo sapiens
  ref <308>: DATABASE ACCESSION NUMBER: AL050021
ggggataagttttttttttttcttttttttcttttctctagtttttctttctggctgagatttccgtgcaagacagcacccaatagactatttagagttgacatttgacattttaatgggcgccatggctcattttgtagattgagaaggtgcgtctcccctgctccaagtctcatcatgacagcgtgctgacagctgggagtctgtggccttcctcacgcagaggccttaaagctggacacagatgcacgcctaggctgggcagggatgggacccatgccccctccttagaggacgggcttcctggttaggaaaggacacgtgggggtgccttgcataatagttcactggtcaccgtgcttttatgagtagtgtttttgtgcacttgccaggggttttctctctgtgtgcgaggggagtgatttaagcaatggtgtctggagtaagccttacaattttaatagactttttcttatcatatccctcatttctttccctgaaataaaaatacacacaagcaaaaaaaaaatgatagtttcacatctcttagttcccttgcccaaacaagaatattcttagttccactggccaggattttcctacatagtcagaacttacacattactagaggcacacccaccaaggagtattgtgtctacttttatctgtgcaccagccacaaatacccacattggaaagacccatttgtgatgggtaaacatcccttcctgtctcccacaacccctgtgactgccctgcatgtgttcatgacctccgaaggccctaattcatgaagcagcaaacccagcagatctccacccccctgcctcaggacctctgctgaagagggggatgaagtgggtctccagggaggcagtgggggccttgttggcagctggctcgggagccggcttacaggagggcagctctgcagttgggaggggcaccgtccggaggagaccaggcctctacacaccccccactctacttatcatccctgctcacacacccttgtccaaggctttatgcatcggatttatttttccaaatcgagaggacagtgatagatgcattttccccaggctgtctcagaaaggtcgctaaatgtatactgttgtcagaattgctgagatctccccccacttttggtttttgcagcagtaaaaactctttccactgtgacttattttctctctcaggcagccagccacctggtcccttgtgctgactctagcacagtggccaggatccaatacgagtccaggggtgaccgcaggatggtgggggcagcgggcttctccacctaccccagccaccaaggccctgacgcactgcctcctgcaccttcagcacatccctgtgcacagctggaagggtgcatggcccgctcacctttgttcagatgggtggaaacgctgatgataccagctcctccctgccgtgcccctgccacggagcaggcattgtgaactggctggtgtttgcagtcccacgtggcatggcctccagcccaacccacagtggagactggagacagggcaatgagtctggtcgggggcacgtggacatgccccataggggccccacccagacttaacaggcaaggtcctgggcattgcgcgacgcaggactcaatgctaaagcaagcctgcctggctctgtgccagggcccctcttctgatttacacatcccatttttacacagacccttccttcttaataaaggctgacagttctgttggcagccaagaacccacaccatgaagacagggagtgaggggcctttgtgcccaactccagcacagctgcgttctggggtgtgtgagaggcatgttcgtgtctgtgcgctggtggtctcgtgagacagttccgaggacggggaaattgcagggtggtgggggcgtgaggcttatatgtggaactgatgcagagttcgcctgcagacggatctggatatacactatgtataattgttacgtgtaatttaaaatatatctgtttgccatcgtcatgagaagattatatgtaaggctctgaagggagagggagatgtacattctgccaggctcctggggaccttatccgagtcatgaaattgatgactgttgatccagtggtgcaagaagctacactccatgtgtcatcacgcttatgactcctaatgtatttttaaggcaaaaaatgtcagccgactccatcttcacccctcgattcctcgagtccagcctttctgtgccagtgcttcactgagccacaacgctctcgccatcgggacccggctgggcctggagtctcggggcacagttgccatggagccctcctgggtcattctacaaatgtgctgagtgccagctgaaaaccccacaggagatggagtaccttggccaagcttaaagagaagattttctcagggtatttattagtgtgtccagcagggtcaggaagcaggatggaaagatgcattcagactgttaatttattaacaaggcaaatgattttgtgtttcttgatgacagactattaagtttgggacttattttcccatttgagaagttataatatatatttaagatgataagtttcctgcttaagttgtgcctttcagcttcaatgagtttaaggagcactaaggctaatgataccaatgagggttggtttattatcaaacctgaatagctgtggtttctccagtaaatattttcttctactgaacatggagccattattaagagttgtgtgttttttattatgtacatttgtatatttttttgcttgtttgatgttctatttttctaatagttttcttttagtttcttaaagttgtgatactagatttagattctgatgctaactgcaaatcaggttggtctctgctgggtctctcctgcttttattttactttaaggacaagtgtagttgtcgtccaccacctttcaaaaaatgtgaaactgccctgcctcccctttttgctgacaacactgtgtacattgaccacttcctaccatactttatgttgtaaaatcaaactcttttgtggtacattatctcatgcttctgcaaattcgaataaattctatggcttccaaaaaaaaaaaaaaaaaaaa

SEQ ID NO: 33 - DNA, 1244 bp, Homo sapiens
  ref <308>: DATABASE ACCESSION NUMBER: AL080065
gggaaagaggatgatgatgaatgtcttgaacaaaaaccagctcagctcggtaggaaatggcgcgaactcggacttcctcctgtttccccgcgtgactgtgtcaaagatgccgtggcagcagaagtgtttgatcacgtctggacaaatatggtagaacttttggaagagctgattagaaaacactgggaaactacactcacagaagggaaaaaacagagagaaacattgaaagtggctggaaacagatttccgcacgtcctcgttccacgcgctcacgccgatggagccagtggccccccgtccggacacgccgaggctcacggcatctccctggcttctcgtctgaacccgccccagattcatcacttctccagcagtttttatagtgacatgaatggtgtcatgacaattcaagcaaaaccgcttcagcggagacctgcctattttgctgacagaacgcagaatgagaaggaggacaaagcatcgggtggaggggcaggtgctctctcctccgcaccgcacagactgggacgggcctcagacactcatggattatcaccttctgcaaagaaaacaccagtgccctggaggctgccttctcttgcttcagattcacagagactaaaaactcccaacatctatagtgacgaagttcttcggggaacaaaactgccgactggcgtggaccacatggcttccccactggttcaaacgtcacggagcaggttccccccgctagtcacggagaccagggggcagaatacagcagttcctggatgccgccttgtttcttacagaggaaggcatctacaaaaccgtgtgttgagtgccatgcctgacggtacagaacgatcgcgtcttcgagaaagaacagccaccctggaacggttgtcaaggcccagcacaacccacacgttccggtcggatacgcctcgaaaaggttcattgacacaaatggaatttgctgctcacacatggacaggtcaaagtattttgacaggttcacaatatgtgcctaaatcttttcagaggacaactttgactttcaagaggagattccaagtgacatcttgaaaccacctcaccagaaccattggagcacctgtggcctcggcacactgcttatcacttgaaaaatggaggaacaagtgttatatttatctgtgtgtctaacagtgtgagatgttagaccgagagaaaagcaaacaaataaatcacttaatctcaaaaaaaaaaaaaaaaaa

SEQ ID NO: 34 - DNA, 2605 bp, Homo sapiens
  ref <308>: DATABASE ACCESSION NUMBER: AL080169
gcatgtccgaagccgcaaccaggtggtcctgtcaaggcagctgtcagaagacctgcttctcacgcgtgaggccctggagaaggaggtgcagctgcggcgacagctccagcaggagaaggaggagctgttgtaccgggtccttggggccaatgcctcgcctgccttccctctggcccctgtcactcccactgaggtctctttcctcgccacatagggtgcagggcctgggcccaccacgacgcctgaagtcacagctccttccaaggtttttctggagaagacagcaggagcctctcagttcttttccaggaaggaacgagggtgggagcgagatggagatcctgggtgtgtgcccagtgagccctggggccttgagttacatggaatcacccacagggttttggaggccccgagaagcgtcttcccttgagttggccaagggaataagcaagaggagacatttcctccctgccccagcactctgtcccaatccgagaagttccgaggctttcccaggggcagtctgtgtcacgctggccatttgacataaaggagacagcccctggtcccagcttgtcagctctgctgccgacttgctgacttatcaacttcctctaggtgtttccactccaccctggcctgctcagagcctcagtttacccctgcattaaaatggtggggggacgggtcaaaggactcttatgtcactgcagtgtcccattctaggattgtctgaaggccagagtaggggttggggggagtgtggacaaaccccgcaaatcagagtggggaaggtgagtggtggagagggggtctctgaaggcccttggggctgacagggccaggcagcctccccagctgaggcatcattcctgggccagagtcgtgtccaccaagggacagtagccagagctcctcttcctttaccaggcaaggtgcatcccctcagccctcctggcccttcagtcttggtgccacctgggcacaggggcaagcttggtggttgtgagtccattcatctatcagagctggaacctcatccctgcacagatgaggaaaccaaggcatggagcagttcccagagtcgaatctagatctcatctgtcatccgggtcttatcctttgctctgtttttctcttcaggctctggaaaatcagatctgtgacttaatcctctccctggccctcacccacttagtttctttttcattcctgctccctgccttaactcctcctcccactgcccctgatcccaggcccaggcttttacaacctggtgctcagcttccccatcagtgaaaaggggtggctagagtaactaacctcagcaggccgtccagtcctgatagtctgtggatttcggatccttctcaggaagcttcatgtctaatggagactataattataactcctgttctgcatagagcatttgcatcaaaggctttccatacccctccctcccctggtcctcataagatccttgaagcaggttcctattcctcattggcaacatggcaaacagatcacaggagtcaaagggccttgctcaaggtccccagcttcagccccaggccctaagccagcgtcagaacagtcaatctgcatttttcatcagtcattctatagtgacatcatcccagactgccttctgtattcccctgtgtacagtctccttctgtttctaggtttagaagttcagaggtgactgtgtttctccatttccacagccaaatgggggaagaggtgaggctaggggagtgctgtgctgattctccagccatggtcagacaggtcacccaggagcctcgaggaaagccctggagggaatcacatgtgtactttttcatgaagctttttgcaaagcacatctgtgatacactagtttattgaactaatgtccaggagtagacatgattggtggccaagttatttggggacacctaaacagatcagtgacctgaatgacttctcagaacctttaatatgccaatgtgtgtggcaaacttacaagaagggagctaagtatccagcctctcccaaacctctttgaacaaagcttctgtccctcccacacctctcacctcacaggcacatcaggctgcagaatgcgctttagaaagcattgttttagtccaggcacagtggctcacgcctgtaatcccagcactttgggaggccgaggtgggtggatcgcaaggttgggagattgagaccatcctggctaacacagtgaaaccctgtctctactaaaaaaatacaaaaaattagcttggcgtggtggtgggcgcctgtagtcccagcagcttgggaggctgaggctggagaatggtgtgaacccaggaggcggagcttgcagtgagccaagatcgcgccactgcactccagcccgggtgacagagcaagactccgtctcaaaaaaaagaaaagaaaaaagaaagcattgttttaattgagaggggcagggctggagaaggagcaagttgtggggagccaggcttccctcacgcagcctgtggtggatgtgggaaggagatcaacttctcctcactctgggacagacgatgtatggaaactaaaaagaacatgcggcaccttaaaaaaaaaa

SEQ ID NO: 35 - DNA, 1034 bp, Homo sapiens
  ref <308>: DATABASE ACCESSION NUMBER: AL080199
gacagactggtctaatatgctcactggtcatcacattcagcttattcttacgtgccagtgaggccctaaggtctcagtgcatagcatacctgccactctggatgttttcctgggcttcatatctgtatggcaaggagggagctgtccttcagcagacaaagtcaagcagctttaagtacaaggcagcttgaaacctctctgatgaaagtgaaaaatgtgggtagcttatactttcaaactaatgccagtgactagagagaggtttcattcatgatgtgtatttccaatttggtcttcaattcaagagatgcttcataaaacacttatagccttaaaccattcaagggctaattaaaaaaatagttatgaaatcttagccacaaaaaataaatcaggtaaacattttaacctgtcgttaagtgttgtaacttcaaaaaaccaaaatgcttattttaatgtgatttttctaaaactattgaaaaattaatatttctataatctattaaaaaaaatggagaatgttttctctcaaatttcctctgacccatgggaatgaaaatacttaaatactgtaaagcatatctattaataattcccccaattttttaaactaacaaaatggaatgttaactgaatggaattaaacatagcaattgtcaagccatcaaaattatatatcgaaccacttaggcatgttacggggtaaagtcctcacccctgcatttgagaaatattttattatttttattttaaggcaaaacagtgtttactgtgatgggcagaacagccttttgtatctaggagtccatttgagttctttccaatatttccatatcgttcataaatgtgtctgggggcttccttgtttggaaaatatggatatcgctttgttttcctttgaaagtaattatatcttaagaacatagtatcatgaatggagtagacagggaggctgcagaagccatttctctttgtagataaaaagcattatctatgattgttgtataataaattgatttttacattaaaaaaaa

SEQ ID NO: 36 - DNA, 1610 bp, Homo sapiens
  ref <308>: DATABASE ACCESSION NUMBER: AL080218
gctttttgcaaatgttgaatcatggttctgtttctaagttggatcttttttgttttctccttgccaccctaatttgacatcaaattctctcttgtgcattgggccctgggtcattcaaacccaggtcacctcattccccttctctgttcacacctaatgtcttgaagagtaggtagcagcagtgtgggctgaacctaggccagcttgcttagcgggtcaccctgctgtgaagtcctggcaggtgttggtaatgtgtggaaatgcagtcagcaagtttgctggggagtttgataaaagtataaaacaaaacaaaaaaagcctcggtataattttgttccacgacttcttctgtagctttacaccagaaggaaggaatgggctacagcaggtagtggaggaagaggggggtgagcaggtgtattaaaatagcttacgggtaaggcctaaaaggtcacccctcggccccctctccaaaagaagggcatgggcacccccaggagaggatggccccaaaaaccttatttttatacatgagagtaaataaacatattttttttacaaaaataacttctgaatttatcagtgttttgccgttaaaaatattcctctatagtaaattatttattggaagatgacttttttaaagctgccgtttgccttggcttggtttcatacactgatttatttttctatgccaggcagtagagtctctctgcctctgaggagcaggctacccgcatcccactcagcccctccctacccctcaagatttgatgaaaattccaaccatgaggatgggtgcatcggggaagggtgagaaggagagcctgcctgctcagggatccaggctcgtagagtcactccctgcccgtctcccagagatgcttcaccagcacctgcctctgagacctcgctctctgttccagcaaccctggttggggggtcagacttgatacactttcaggttgggagtggacccaccccagggcctgctgaggacagagcagccaggccgtcctggctcactttgcagttggcactgggttggggaggaagagagctgatgagtgtggcttccctgagctggggtttccctgcttgtccagttgtgagctgtcctcggtgttaccgaggctgtgcctagagagtggagatttttgatgaaaggtgtgctcgctctctgcgttctatcttctctctcctccttgttcctgcaaaccacaagataaaggtagtggtgtgtctcgaccccatcagcctctcacccactcccagacacacacaagtcctcaaaagtttcagctccgtgtgtgagatgtgcaggttttttctagggggtagggggagactaaaatcgaatataacttaaaatgaaagtatactttttataatttttctttttaaaacttggtgaaattatttcagatacatattttagtgtcaaggcagattagttatttagccaccaaaaaaaagtattgtgtacaatttggggcctcaaatttgactctgcctcaaaaaaaagaaatatatcctatgcagagttacagtcacaaagttgtgtattttatgttacaataaagccttcctctggaagggaaaaaaaaaaa

SEQ ID NO: 37 - DNA, 2018 bp, Homo sapiens
  ref <308>: DATABASE ACCESSION NUMBER: AL109696
gggagcatctgaagggataatgatttttaagtggtaccctgttcatgccaggaccagcatttgtacatgggaaaataatcttaagatgagtgaaaagcaaatgctagaccacacctttaataggcccaagtgccaacaaaaatacgtgtgagtgggattcccacggagaaatgtttctgaatgaaaatgaaacccttgataatgaatcctgaggccagaatgccaaagtcacagtattctgtcatttacagcccctaaaaaatcccaggtgtttgtgatgacaagccactattataagtactctgtattagtgactacttggcaagtaaaattttctcaaatgttatttttcatagatctccaagcaacaatcacttgcagtgtatctgacaaaatgctatacatgattttctaaaagtattttgatcactccagaaagaaatcagaataaagctgcataccccaaatcctagaaaattcacaaatattttgctcaagttcaggctctctcagcttctcttttctctttaacttttgcctcatacagaggcaatcttgatgacaaaagattgggctcaatttttgtttttcttatgtagaaaagcaacacctctgtttcggactactgttcagtagacaaaaagcatcccagctttcgaaatgagagtccaaattgggttaccactgagattttaaattatgatgtgaaattggagaaggtgaactgtacagggccagacaaataatagagcccactctctgggcagttgcatgcagtcttgctgggtgctgagctgagagactgagagccgcttttgagacgtgttttgaggcatatcttccttaaatttttgctggtgtctgttttttagaagttttgccattagcatttttcactttgagtatctagccatggagaatgctctaaaaaatacaaggagacagggggatgctttatctatttggcttagtcactggttcagggtgaagtttcataatttattctgataatctggaggggatgacctccttcacagtactgttaaagccttccttgaacaagctcatttcactatataacttcctaaagacaaggctgattatttaaggatttcagagatatcatttggggaataactcaccatctgccccttctctgagagtttagcctttcttaggatacttccttttccaggctagaaaagattgattgtattcatatcccaaagtaaaggctcctccaattctatcagatgtggaggcaacagaaaatgactcatgttatttttctctcacttcacagcatcaagaactcttcttgtttatgtgggggccatggtggattagcttgaggaactgtcaaattaaaatgaaaggaaagcaagttggggcaagaaaattctcactctgaatgtgaaagaaaatagcagtgttcttctctctggcaaagatttgtgtactgttgggggaagattcatgttatttctcaggtagactttactttttgagattctgtgtgtgtgtgtgtgtgtgtgtgtgtgtgtatgtgtgtgtgtgtgtgtattttgcctggtggggggttaaaggcagatagaatgtagttgtttatgagtttatactttctctttagcataatagatgccctgtttattttctcagaatgtgacaataaaattaggaaaggagaggaattcagaggcccatgttgcagttcatggcaaagttttacccaaatatttccttcagaaacatttagtcatagcaagccatataaattattgtctgcaactggtatcagaaaaagaaatcagtaggtggggactgtagaccccaatggtgcatctgtttacaatctttcttttccaaggttttaaggttcatgaataacatgagggaattttgggagagctaccacatcagtactttggcacgcattaactgttccacaggaaaactagggttgcttcagggctatttttgtttgaaatgacacacatacaaaaaaaaaaaaaaaaaaa

SEQ ID NO: 38 - DNA, 4747 bp, Homo sapiens
  ref <308>: DATABASE ACCESSION NUMBER: AL110280
gggcagggaaggccaaaggtccaagggagccggcccagggagccctggccctgacctcccagaggctctagctctgtgggtgaaggctgctgtggcaccagccgggggcaggtctgcacagtggacagactctggtggaagcatcctggatcccagggccaggtcaggcccccagacaggggtgtagacatgctttataagtggggaagggcctgcttcctgagtcggaggctgagaggatggagggtgcagctttagtactgggcacctcagtgacttatatcacacccatgccctgcagcctaccccgtgcggtgcctgctgcccagtgcccatggctcttgcgcagactgggctgcccgctggtacttcgttgcctctgtgggccaatgtaaccgcttctggtatggcggctgccatggcaatgccaataactttgcctcggagcaagagtgcatgagcagctgccagggatctctccatgggccccgtcgtccccagcctggggcttctggaaggagcacccacacggatggtggcggcagcagtcctgcaggcgagcaggaacccagccagcacaggacaggggccgcggtgcagagaaagccctggccttctggtggtctctggcggcaagaccaacagcctgggccaggggaggccccccacacccaggcctttggagaatggccatgggggcaggagcttgggtccagggcccctggactgggtggagatgccggatcaccagcgccacccttccacagctcctcctacaggtgaggcccaccttccccaggtgagggggttaggacgcccagacaaggagcatgccagttggagctaaacccctgaagtcagccggccctccctccccatccctaacttctgtttctcccgagagccctgcctggtgggccttgttgccatcattctacagatggagaagctggggcttcagagacttgaggctactctgatgtctaatagacatctgtgcagatggtggctccggggttctccatcagatctcgccagtataccccggggcctgtctggctggaaaagtttattggcttcgtgacctttggcaagtcacccaacttctccaagcctcagtttcttgacctgtaaaatggtggcattaccttctgccctgtatacctcacaggtgtgggttctggtcaagatgactcctgggactggatcatattaatgaaggatttgggaaggttaaaaacaaaattaaaagcgttgtgttccacatgggtcgagcgtgtagtttagcccccacatgaacctggtgtgtgccgtccctcccgacctctccccaccccttgggctttgcacctaccttgttgctgctacaagaacaggttgaggcagtgatgcttgggggagccgggggcaggttggggagggtagattcctgaatccatgggcttctggggctctgcctcccatagggaccctctagccccaaaagtgcctgtgacaggatgggccccaagctgtctgtcatggaacacactgattagggtggttctggtcctggcgctcatgccagtcagcagatctcacttcccacctctccaggattagcttggcaggtgtggagccctcgttggtgcaggcagccctggggcagttggtgcggctctcctgctcagacgacactgccccggaatcccaggctgcctggcagaaagatggccagcccatctcctctgacaggcacaggctgcagttcgacggatccctgatcatccaccccctgcaggcagaggacgcgggcacctacagctgtggcagcacccggccaggccgcgactcccagaagatccaacttcgcatcatagggggtgacatggccgtgctgtctgaggctgagctgagccgcttccctcagcccagggacccagctcaggactttggccaagcgggggctgctgggcccctgggggccatcccctcttcacacccacagcctgcaaacaggctgcgtttggaccagaaccagccccgggtggtggatgccagtccaggccagcggatccggatgacctgccgtgccgaaggcttcccgcccccagccatcgagtggcagagagatgggcagcctgtctcttctcccagacaccagctgcagcctgatggctccctggtcattagccgagtggctgtagaagatggcggcttctacacctgtgtcgctttcaatgggcaggaccgagaccagcgatgggtccagctcagagttctgggggagctgacaatctcaggactgccccctactgtgacagtgccagagggtgatacggccaggctattgtgtgtggtagcaggagaaagtgtgaacatcaggtggtccaggaacgggctacctgtgcaggctgatggccaccgtgtccaccagtccccagatggcacgctgctcatttacaacttgcgggccagggatgagggctcctacacgtgcagtgcctaccaggggagccaggcagtcagccgcagcaccgaggtgaaggtggtctcaccagcacccaccgcccagcccagggaccctggcagggactgcgtcgaccagccagagctggccaactgtgatttgatcctgcaggcccagctttgtggcaatgagtattactccagcttctgctgtgccagctgttcacgtttccagcctcacgctcagcccatctggcagtagggatgaaggctagttccagccccagtccaaaatagttcatagggctagggagaaaggaagatggactcttggcttcctctctctggctggcaaagggagttatcttctggaatacattagctctttcaaaacccacccagtgtttagcctcaacggcagccagttaccagcttctctctgtagccttcagcagtgtttgcatctctgacataaccacaggctgctgttttcaagaagagcaatctgtttggataagaaaaacctttactttacagcttccctttataatttgttacacaggaatagttaaatgcatttgtttgtttgttttttgagacagagtttcactcttgttgcccaggctggagggcaatggcgcgatctcagctcactgcaacctccgtctcctgggttcttgattctcctgtgtcagccttctgagtagctaggattacagatgcctatcaccatgcctgggtaatttttgtatttttagttgagatggggtttcaccatgttggccaggctggtctcgaacttctgacctcagatgatctgcccgcctcagcctcccaaagtgctgggattacaggcatgagccaccacgcccagccatcaatgcattttttttattttttttttgagacagagtttcgcacttcttgcccaggctggagtacaatggtgcgatcttggctcactgcaacctccacctcctgggttcaagcgcttctccagcctcagcctcctgagtagctgggattacaggtatgtgccaccatgcctggctaattttgtatttttagtagagacggggtttctccatgttggtcagactggtcttgaactcccgacctcaggtaatccgcccgcctcggcctcccaaaatgctgggattagaggtgtgagccactgtgcccagcccatcaatgtgttttaaagctagctgtcagggttccacttaatttaaagctgggcagggagatgtgtaatgatttcaaagttaacacctgtttgttttctaaagggcatgccaagtcctgctgtatcagggaagtattctgtgctaaaatcagcgatggttcattgctctagtctctctcacccttctaggcagtgcatcagtcagctctaaatctggtgcagagggttaacagcataacccttgttggcaaaatggaatagatgttaagacctcaaatagggatttgggatgaaacagctgcagttagcactgttatctgagcatgaaagaactggaaacgctccttacgtcgagatgttggaccttgaagccctcctgaggccaacatgcaaatctggctgtgacggttcatctgacacctgtgtaaagctgaccagcctgctctgtacagtgacaatgaggagcccctctcttccttaagtaggaatctgtgaagcaaaatgtttgctgccaaagacaaatcagactgtcagtcattaaaaacagcattagcaggatgaggatagcaatggggaagggttgtgggcaatgcagtaacagggaaatggcttcagaaatggtttgagttggaagacaacattcttcatctctcaggacttctaattccttgatgctaaaagaagaggcatggattctatgagcttccaagtccctttccactttaaccttctacaaatctttcagaggactgcctagtagcaaaggttattcctggacacaggaaagacgggcattacagggaccaaagctctgaaaggtgacttttattaccaacacactggctggaaaagggacaaaccacatcacgggtgagtgatacttctcagtcttctctactcattcaacaaaggaaatgtgggctggggcagaggtcttttttcatttaatactggaaaaatattgaagagcatccatgttcacttatggctggttttgctatagaaattggaaaataaaggccacttttttgaaaaaaaaaaaaaaaaaaaaaaaaaaaaaaaaaaaaaaaaaaaaaaaaaaaaaaaaaaaaaaaaaaaaaaaaaaaaaaaaaa

SEQ ID NO: 39 - DNA, 993 bp, Homo sapiens
  ref <308>: DATABASE ACCESSION NUMBER: AL117544
cggacgcgtgggctgaaaagaaaatcggggtctggaagcctgtggagagtaagtggatctcttcatcttgtaaaatcattgcttttcgcaaagcattattgaatccagttacttcaagacaatttcaacgttttgtggctctaaaaggagatttattggaaaatggtttactcttttggcaagaagtacaaaaatataaggacttgtgccattctcattgtgatgagtctgtcatccagaagaagattacaactattatcaactgctttattaattccagtattccaccagctttacaaattgacattccagtagagcaagcccagaagattattgaacaccggaaggagttaggaccatatgtatttagagaggcacagatgacaatttttggggttctgtttaaattctggcctcagttctgtgagtttaggaagaatttaacagatgaaaatattatgagtgttttagagagaagacaagaatataataagcagaaaaaaaaattggcagtcctagaagacgaaaaatctggaaaggatggaatcaaacaatatgcaaatacttcagtgcctgctatcaaaactgccttactcagtgattccttcctaggcctccaaccatatggccgacagccaacctggtgctactcaaagtatatagaagccttagaacaggagagaattcttcttaagatccaagaagaactagaaaaaagttgtttgcaggcttgcaacctctcacaaattttaaggctagctcttcaactatgtctttgaaaaagaatatgtctgcccacagcagccagaagtgacagcattcttgtgaatgtttacatcctgctgctgataggttcaaggaattctttaaaccagattctgctgacatgagaagctccagtgatttgtttttttgaaggtctgtatcagagcaagcctaacatctaaataaagtttgattctggattttccaggtgggaaataaaaaaaaaaa

SEQ ID NO: 40 - DNA, 750 bp, Homo sapiens
  ref <308>: DATABASE ACCESSION NUMBER: AL117629
acgcgtccgctcaccggctgctgcagcattatcagttgcacagtgcagcagtgaacgggctctctttccacccgtcgggaaactacctgatcacagcctccagtgactcaaccctgaagatcctggacctgatggagggccggctgctctacacactccacgggcatcagggaccagccaccactgttgccttttcaagaacgggggagtattttgcttctggaggctctgatgaacaagtgatggtttggaagagtaactttgatattgttgatcatggagaagtcacgaaagtgccgaggcccccagccacactggccagctccatggggaatctgccagaagtggacttccctgtccccccaggcagaggcaggagtgtggagtctgtgcagagccagccccaggagcccgtgagtgtgccccagacactgactagcacgctggagcacattgtgggccagctggatgtcctcactcagacagtctccattctggagcagcggttgacactgacagaagacaagctgaagcagtgtctggagaaccagcagctaatcatgcagagagcaacaccatgatcaggggagcaggaatcaggagctcggtggatttgcaggtggcaggccagggatttgtaccatgggacttgggtaaataaaggggactgaactctgtgggactcccaaaaaaaaaaaaaaaaaaaaaaaaaaaaaaaaaaaaaaaaaaaaaaaaaaaaaaaaaaaaaaa

SEQ ID NO: 41 - DNA, 2000 bp, Homo sapiens
  ref <308>: DATABASE ACCESSION NUMBER: AL122091
ggtatcgatgacgtggacattgacctccacatcaacatcagcttcctcgatgaggaagtctctacagcctggaaggtcctccggacagaacctattgtgttgaggctgcgattttctctctcccagtacctagatggaccagaaccatccattgaggttttccagccatcaaataaggaaggatttgggctgggtcttcagttgaaaaagatcctgggtatgtttacatcccaacaatggaaacatctgagcaatgatttcttgaagacccagcaggagaagaggcacagttggttcaaggcaagtggtaccatcaagaagttccgagctggcctcagcatcttttcacccatccccaagtctcccagtttccctatcatacaggactccatgctgaaaggcaaactaggtgtaccagagcttcgggttgggcgcctcatgaaccgctccatctcctgtaccatgaagaaccccaaagtggaagtgtttggctaccctcccagcccccaggcaggtctcctgtgccctcagcacgtgggcctccctcccccagcacggacctctcctttggtcagtggtcactgcaagaacattcccactctggagtatggattcctcgttcagatcatgaagtatgcagaacagaggattccaacattgaatgagtactgtgtggtgtgtgatgagcagcatgtcttccaaaatggatctatgctgaagccagctgtctgtactcgtgaactatgcgttttctccttctacacactgggcgtcatgtctggagctgcagaggaggtggccactggagcagaggtggtggatctgctggtggccatgtgtagggcagctttagagtcccctagaaagagcatcatctttgagccttatccctctgtggtggaccccactgatcccaagactctggcctttaaccctaagaagaagaattatgagcggcttcagaaagctctggatagtgtgatgtctattcgggagatgacccagggctcatatttggaaatcaagaaacagatggacaagttggatcccctggcccatcctctcctgcagtggatcatctctagcaacaggtcacacattgtcaaactacctctcagcaggctgaagttcatgcacacctcacaccagttcctcctgctgagcagccctcctgccaaggaggctcggttccggaccgccaagaagctctatggcagcacctttgccttccatgggtcccacattgagaactggcattcgatcctgcgcaatgggctggtcaatgcatcctacaccaaactgcagctgcatggagcagcctatggcaaaggcatctacctgagccccatctccagtatttcctttggatactcaggaatgggaaaaggacagcacaggatgccctccaaggatgagctggtccagagatacaacaggatgaataccatcccccagacccgatccattcagtcacggttcctgcagagtcggaatctaaactgtatagcactttgtgaagtgattacatctaaggacctccagaagcatgggaacatctgggtgtgccctgtgtccgaccatgtctgcacaagattcttctttgtatatgaggatggtcaggtgggcgatgccaacattaatactcaggaccccaagatacagaaggaaatcatgcgtgtgatcggaactcaggtttacacaaactgagggggccccagccctcgtaccacccctgttaccccaggatccatctgccctcataaaagtgttcaggtacagcagctgaggctgccctgaggaatcaaggggccattaccaaggggcaggaaaaggatatgtaagaggtggccttcatggtagagcttgacccaagaactactccacattcggatggcccagactgactccatcccctgactttccctttgacttcaccctgtttgtaaataaaacaataaaatggaaggtgctgtggactggaaaaaaaaaaaaaaaaaaaa

SEQ ID NO: 42 - DNA, 4249 bp, Homo sapiens
  ref <308>: DATABASE ACCESSION NUMBER: AL133017
cctcaagctaatttcaggtcacaatttgaggtcaaaggcttttaaagcctttgcctacaagtcactccaagatgagcagataaagtgtgatgaacacagatagagtgagcttctgaccacaggacatttgcacagcccctgttgcaaaaagagccagtttatttactgaagggaaaaaagttgcagagcaattactttaagaaaaaatgtgaggaagaaacccctgtatagtgctgtacgtgtcagcgtcttgtgtggtagtctcatcttctctgggctggggccggttctagagtggaggatgccattgttgacctcgggactgggggcccacttgtgcagaactacatcagggggtatggtggggccttgagctctgggctccaccggtagagttttgcaggggtgttcaatgaactcagttatttacaaaccacacccaggcccatctgccccttcccaagacactagctgggtctcgagccatgtgactgagctcgactgattccctccccagcctaggagctgagcttgtcctgtgctcagtcttcccataaggacatgccaggtttgtgtgtacctggcaacatgcatgcccatagcctgcatctgtagtaggtcaagacgtgataggccggaagcaagaggagaggatttggtctttgacctgtcaggctcagaatacaagggccccccagggtgtagcaccctgatggggggagcaattttaccacccctttgactcagccagaccctcttaccagagtccactctcttcccccaacaggttgtttgactggctggtatcagtgatcaacagcagcatctgtgcagacaccgactcgtggaccactttcataggtagcaaggcctcactgtgctgggagcactccagaaaaagagcaataaagccctggatggagaggcaggagccctgggtccactgtgtgactctgggcagttcctttcccttttttgtctcctcttgcatctgcctgccagcatagagcgagatctctgcatagggtgagatctctgctctcctgcacccacatctgagcagtccataactctccagacaggctcaacagtgccttgtctgaaagagccctttacctccccagagacccagctctaattgtgggagagtagtgggggttggggaaaatagctgtattagaagggactttggaggctggcaccgtggctcacacctgtaatcccaacattttgggaggccaaagtgggaggatcactggaggccaggagttggagaccagcctgggcaatatagcaagaccccatttcaaagaaattagccaggcatggtgctacatgcctgtagtcccagctactcaggagaccgaggtgggaggatcactttagcccaagagtttgaagcttctgtgagctgtgatcacaccactgcactccagcctggtcaacagagcaagaccctatctcaggggggagaacaaaaaaagacttgggggacatgactgagggaggtcaacacggttgtaactaggtgggacagtcagttataggaggaaataaagcttaaaggtacaagtgcagtttgctcatggaatggtggaattctaggcaccaaattggctagtgagactaatgccctccgaactagatttaacacagaaaatgttccctgggacctggtttcctcataggaggtgcctatcagaaccagagaattcagactcaaaaatgggcctgatgctctgggctgtcttcacacttcatttgggtttcctgcttgctctgagctctacaggggaatggggtagagatgggagccaccttgggtggagggtggggaaggtatgttctgcccaccacaggtgtcatgctcactcagcctgatgcccaggctgccaagtataaggcattggcaggggcccagccaccctgggttccttggtcccctattccccatctgctccctgcagtggccccatgggttctctgccatcttcccaggcctgctggatgtgtatggatttgaatcatttcctgacaacagtctggaacagttgtgcatcaactacgccaatgagaagctgcagcagcattttgtggctcactacctaagggcccagcaggaggaatacgcagttgagggcctggagtggtcattcatcaactaccaggacaaccagccctgtttggatctcattgagggaagccccatcagcatctgctccctcataaatgaggaatgccgcctcaatcgacccagcagcgcagcccagctccagacacgcattgagactgccctggcaggcagcccctgcctgggccacaataagctcagccgggagcccagcttcattgtggtgcattatgcggggcctgtgcggtaccacacagcaggcctggtggagaagaacaaggaccctatcccacctgagctgaccaggctcctgcagcaatcccaggaccccctgctcatggggctgtttcctactaaccccaaagagaagacccaggaggaaccccctggccagagcagggcccctgtgttgaccgtggtgtccaagttcaaggcctcactggagcagcttctgcaggtcctacacagcaccacgccccactacattcgctgcatcaagcccaacagccagggccaggcgcagacctttctccaagaggaggtcctgagccagctggaggcctgtggcctcgtggagaccatccatatcagtgctgctggcttccccatccgggtctctcaccgaaactttgtagaacgatacaagttactaagaaggcttcatccttgcacatcctctggccccgacagcccatatcctgccaaagggctccctgcctctgtcttcagagaggcactgggcatctaaggtggtcagagccctcagaatggtgtccacacagcgaggaagccacgcttgaacctctcatccaggacattctccacactctgccggtcctaactcaggcagcagccataactggtgactcggctgaggccatgccagcccccatgcactgtggcaggaccaaggtgttcatgactgactctatgctggagcttctggaatgtgggcgtgcccgggtgctggagcagtgtgcccgctgcatccagggtggctggaggcgacaccggcaccgagagcaggagcggcagtggcgggccgtcatgctcatccaggcagccattcgttcctggttaactcggaaacacatccagaggctgcatgcagctgccacagtcatcaagcgtgcatggcagaagtggagaatcagaatggcctgccttgctgctaaagagctggatggtgtggaagaaaaacacttctctcaagctccctgttccctgagcacctcgccgctgcagaccaggctcctggaggcaataatccgcctctggcccctgggactggtcctggccaatacggctatgggtgtaggcagctttcagaggaaattagtggtctgggcttgcctccagctccccaggggcagccccagtagctacactgtccagacagcacaagaccaggctggtgtcacgtccatccgagcgctgcctcagggatcgataaagtttcactgcagaaagtctccactgcggtatgctgacatctgccctgaaccttcaccctacagcattacaggctttaatcagattctgctggaaagacacaggctgatccacgtgacctcttctgccttcactgggctggggtgatccttggtgcctttgtttccacaaggccttttcctgccccctgccttgccaaagacatttaatcagcacacagctgccagactattcccacagtgctccaaatgcacatgaacaacagtgacggctccagccttcgacccagagccccgtgcccagtgcgtcagtgggcctggggttccaggctacatcaagcactgatggtgtcagggctggtagttaccaaatcagggttaagaaacatcagggccacatttcactaccttcacagatcaaactcagcagcagtcatgactgtctgtcactacactggggatcccaattccacataagcacttttggaagaaaacagccaaagttggcctaaaattggcgctggaatttgggctgggaaaaatcttgtggttatttcctttaaaaaggaacaaaactttagtatttaattagttgatttatttaatgtaatttcaaacaattaaattatgaataatgcaatgtaaaaaaaaaaaaaaaaaaaaaaaa

SEQ ID NO: 43 - DNA, 1522 bp, Homo sapiens
  ref <308>: DATABASE ACCESSION NUMBER: AL133052
attaaactctttgaatctccaaacaaggaagtttcagcattcccttatggatcagaggaaccttagaggcctgaaattgttgcttccagtttagctgcccctcaaattcaagtgaatattttcccttctccctttacccttctccagaaataaagcaggtgacagggttttcagaatcttaccatattgacttgtgtatcttttttaaaaaataatttgtgatatttattgcatacattttcttttggcagttttggattttaggtatttttttgcatgaggctgataatggtgatgatgactttatacccttggtactatactaggaactttacatagtatctctacttctcacagtcttgcaaagtaggtgatattattcccattttatagttgagaaaacggaattagtgactgtacctataacaccagtaaatgcagagccaagattctgacccaggtctttttgttgtaccataagtttaaaagatgagtctcatttttcttgtggtagatggtggtaaaaaggagtaggcagagtgtacatagataaaaaaaagtaaaagggtaagtaaaaaattgattgtggtatatgttattctaatcagccaaaaaagtttagaagattgatgaaatgatcttttaaatatgtatttctgaataaaatgtaaaaccaagaaagttatttcaggaaggatagtgaccctttcattgaactgttagaagggcatttattaggctaaaacgtcattaacaaaatgcattgcatgttgaaaccagcctcttgaaccataagcacttagcgactttgctctgccctgtactgtgctgcttctgctgtcatcctgtgtgcctacagaagcctggtcttccgtccatgcagaaatgcttatgtcctcctgttgtttagatgactcctattgttcaggtgtactctgagaagagaatcacgtttttctgttttgctaaggagaaaaccttgctgcttgtctctcctcccaccctccaccatccaaaattaaccagtgagctggatattacctggatattgccaggaggtgggcattaagacagtattctttaaaagtgaaaatcttgtgaggcaaactgctaaattcacattttttttttttttttttttaccatcttccctaggaatattcctagaaagcatctgcttaattttgctgctaacagctaaccttatcccacgttgagggtggtattaaaactgttcacacagagtgagcctgggtcagtcaaaaacagaatttgggcatttgagtgataacagacaacctaaggacaatgagcactttgcagatctctacaattaaaagttgcctctttgaggcaggaggagagaagcacagtccctgccaggttgcctgaactaaagatgccatggagcaggagtgtcttggtgcattgttccccgcttaggagtacctttaaaaagggggtgaaataaatttggcttaataattgtaaaaaaaaaaaaaaaaaaaaaaaaaaaaaaaag

SEQ ID NO: 44 - DNA, 2327 bp, Homo sapiens
  ref <308>: DATABASE ACCESSION NUMBER: AL133092
atacaaaaagcttttcatgtttgaacgtgttcaccatggcgaggagctccacatgcccatcacagtaatctggggcgtgtccccagaagacaatggcaacccactaaatcccaagagtaaagggaagttgacattagatagcagttttaacatcgccagcccagcttcccaggcctggattttgcacttctgtcaaaaactgagaaaccaaacattcttttaccagactgatgaacaggacttcaccagctgcttcattgagacattcaaacagtggatggaaaaccaggactgtgatgagcctgccctgtacccatgctgcagccactggagcttcccctacaagcaagagatttttgaactgtgcatcaagagagctatcatggagctggaaaggagtacagggtaccatttggatagcaaaaccccagggccgaggtttgatatcaatgatactatcagggcagtggtgttagagttccagagtacctacctcttcacactggcttatgaaaagatgcatcagttttataaagaggtggactcgtggatatccagtgagctgagttcggcccctgaaggcctcagcaatggttggtttgtcagcaatctggagttctatgacctccaggatagcctctccgatggcaccctcattgccatggggctgtcagttgctgttgcatttagcgtgatgctgctgacaacttggaacatcatcataagcctttatgccatcatttcaattgctggaacgatatttgtcactgttggttctcttgtcctgctgggctgggagctcaatgtgttggaatctgtcaccatttcggttgccgtcggcttgtctgtagactttgccgtccattatggggttgcctaccgcttggctccagatcccgaccgagaaggcaaagtgatcttctctctgagtcgcgtgggctctgcgatggccatggctgccctgaccaccttcgtggcaggggccatgatgatgccctccacagttctagcttacacccagctgggcaccttcatgatgctcatcatgtgtatcagttgggctttcgccaccttctttttccagtgcatgtgccggtgccttggaccacagggtacctgtggtcagattcctttacctaaaaaactacagtgcagtgccttttcccatgccttgtctacaagtcccagtgacaagggacaaagcaaaacacataccataaatgcttatcatttagatcccaggggcccaaaatctgaactggagcatgagttttatgaattagaacctctggcttcccacagctgcactgcccctgagaagaccacttatgaagagacccacatctgctctgaatttttcaacagccaagcaaagaatttagggatgcctgtgcatgcagcttacaacagtgaactcagcaaaagcactgaaagtgacactggctctgccttgttacagccccctcttgaacagcataccgtgtgtcacttcttctctctgaatcagagatgtagctgccccgatgcctacaaacacttgaactatggcccacactcttgccagcagatgggggactgcttgtgccaccagtgctctcctaccactagcagctttgtccagatccaaaacggcgtggcacctctgaaggccacacaccaagctgtcgagggctttgtgcaccccatcacgcacatccaccactgtccctgcctgcagggcagagtaaagccagccggaatgcagaattctctgcctaggaattttttcctccacccagtgcagcacattcaggcccaagaaaaaattggcaagaccaatgtacacagtcttcagaggagcatagaagagcatcttccaaagatggcagagccatcgtcatttgtctgcagaagcactggatcgttactcaaaacgtgttgcgaccccgagaataaacaaagggaactctgtaaaaatagagacgtgagcaatctggagagcagtggagggactgaaaacaaggcaggagggaaagtggagctgagcttgtcacagacggatgcaagtgtgaactcagaacatttcaatcagaatgaaccaaaagtcctatttaatcatttaatgggggaggctggttgtaggtcttgcccaaataattcacaaagttgtggcagaattgtgagagtgaagtgcaattctgtggactgtcaaatgccaaacatggaagccaatgtgcctgctgtattaacacactcggaactttctggtgaaagtttgttaataaaaacactataataaatgcagcattcaattcagaaaaaaaaaaaaaaaaaaaaaaaaaaaaaaa

SEQ ID NO: 45 - DNA, 1513 bp, Homo sapiens
  ref <308>: DATABASE ACCESSION NUMBER: AL137379
gatctcacagatgctacacgagacacttcagccctggtagccaggctagacgagatggagaggggcttatttcaaacagggcagaaaggactgaatgactttcagtgttgggagaaggggcaggcttctcagatcacagcttccaacctcgttcagaattacaagaagagaaaattcactgatatggaagactgaaagccggaagaacacagaatggctcctcacagacgtatccctccgtgtgtccttgataggagctggttgaccttgtacagaaccagaatcctgtcccatttcatggcttatttcctgtggccatagagaattatagggaactggacatgctggaggatgtgggtgtccctggctctgtgagtcttccaggaccgtcccaccctgctgacccacagcccaggccctttaacccaagaacccatggccaaggagaaatcaaagtccttcctaaataagaatcactgccatataatatatcacagtagagttgcaactgagattccttgtgtctgggagtttggacagcttcagatgtacagtttcactagccacaaagcacaggtacaaactgggtcatcgcctgttcacaaaatgctctcttgatcttatttgcctcatcttcctcatggttgtacagaggatagcaccccaccatgccagcctgacttggagatatctcctgctgcctgcctgcagggagttaccccagtttccaaaaacagtcgcccagataaaggaggaaaagggaaaggcagacgaatggcatggcttttactaaagaaaagatgttggcctcatactctatactcagggcttaatgaactggaatctgcataactcagcagtcaacccagaagggaaatggttaaactgagcttgttattgcctcggagagcctaagagcacccgcacacttaattctactccctgtctagaaaagctgtcagggagtcgtttggaattgcaatgtagttattaagggctgttaaccagcctgcattacatctggaagtcaggacttgggtgctgactatgaagggccctgttttcaaaatctaacattgcaagtgtaaatgggcaagaagcctccgttgtgctttttttttcctcttcagtaacttttgcaacattattgcatagaagatccctgaccatttactaggaacctggttaagcaagcactaatctcttttcctggagatcaaggatgcaacctcaggttgagaaagaaacagggttccctgggcccattagactgtttgcagggcatcactgcttccccctgacacctcacaactagcaaaaattgtctttgtctttggaaattatagagggatttgggtatccagattgtgcagatgcaaacttaggctgtcttgatgcaaacttagaaccacagaaatgcttttaaaatgcctgttttaagatggaattgttgtttttataatttgattttagtgctaaataaatgattggctttgtacatgaaaaaaaaaaa

SEQ ID NO: 46 - DNA, 3619 bp, Homo sapiens
  ref <308>: DATABASE ACCESSION NUMBER: AL137566
attagggataggaagagattttcacatggcagactttagaattcttcactttagccagtaaagtatctccttttgatcttagtattctgtgtattttaacttttctgagttgtgcatgtttataagaaaaatcagcacaaagggtttaagttaaagcctttttactgaaatttgaaagaaacagaagaaaatatcaaagttctttgtattttgagaggattaaatatgatttacaaaagttacatggagggctctctaaaacattaaattaattattttttgttgaaaagtcttactttaggcatcattttattcctcagcaactagctgtgaagcctttactgtgctgtatgccagtcactctgctagattgtggagattaccagtgttcccgtcttctccgagcttagagttggatggggaataaagacaggtaaacagatagctacaatattgtactgtgaatgcttatgctggaggaagtacagggaactattggagcacctaagaggagcacctaccttgaatttaggggttagcagaggcatcctgaaaaaagtcaaagctaagccacaatctataagcagtttaggaattagcagaacgtgcatggtgaggagatgccaaaggcaagaagagaagagtattccaaacaggagggattccaaagagagaagagtatcccaaacaacatttgcacaaacctgatggggagagagaatgtggggtggggatggatgatgagactgaagaagaaagccaggtctagataatcagtggccttgtacaccatgttaaagagtgtagacttgattctgttgtaaacaggaaagcagcacaattcatatgaatattttagaagactcccactggaatatggagaataaagttggagatgactaatcctggaagcagggagaacatttttgaggaagttgcactattttggtgaaaatgatggtcataaacatgaagaattgtaggtgatcatgacctctctctaattttccagaagggttttggaagatataacataggaacattgacaggactgacgaaaggagatgaaatacaccatataaattgtcaaacacaaggccagatgtctaattattttgcttatgtgttgaaattacaaatttttcatcaggaaaccaaaaactacaaaacttagttttcccaagtcccagaattctatctgtccaaacaatctgtaccactccacctatatccctacctttgcatgtctgtccaacctcaaagtccaggtctatacacacgggtaagactagagcagttcaagtttcagaaaatgagaaagaggaactgagttgtgctgaacccatacaaaataaacacattctttgtatagattcttggaacctcgagaggaattcacctaactcataggtatttgatggtatgaatccatggctgggctcggcttttaaaaagccttatctgggattccttctatggaaccaagttccatcaaagcccatttaaaagcctacattaaaaacaaaattcttgctgcattgtatacaaataatgatgtcatgatcaaataatcagatgccattatcaagtggaattacaaaatggtatacccactccaaaaaaaaaaaaaaagctaaattctcagtagaacattgtgacttcatgagccctccacagccttggagctgaggagggagcactggtgagcagtaggttgaagagaaaacttggcgcttaataatctatccatgttttttcatctaaaagagccttctttttggattaccttattcaatttccatcaaggaaattgttagttccactaaccagacagcagctgggaaggcagaagcttactgtatgtacatggtagctgtgggaaggaggtttctttctccagttcctcactggccatacaccagtcccttgttagttatgcctggtcatagacccccgttgctatcatctcatatttaagtctttggcttgtgaatttatctattctttcagcttcagcactgcagagtgctgggactttgctaacttccatttcttgctggcttagcacattcctcataggcccagctcttttctcatctggccctgctgtggagtcaccttgccccttcaggagagccatggcttaccactgcctgctaagcctccactcagctgccaccacactaaatccaagcttctctaagatgttgcagactttacaggcaagcataaaaggcttgatcttcctggacttccctttacttgtctgaatctcacctccttcaactttcagtctcagaatgtaggcatttgtcctctttgccctacatcttccttcttctgaatcatgaaagtctctcacttcctcttgctatgtgctggaggcttctgtcaggttttagaatgagttctcatctagtcctagtagcttttgatgcttaagtccaccttttaaggatacctttgagatttagaccatgtttttcgcttgagaaagccctaatctccagacttgcctttctgtggatttcaaagaccaactgaggaagtcaaaagctgaatgttgactttctttgaacatttccgctataacaattccaattctcctcagagcaatatgcctgcctccaactgaccaggagaaaggtccagtgccaaagagaaaaacacaaagattaattatttcagttgagcacatactttcaaagtggtttgggtattcatatgaggttttctgtcaagagggtgagactcttcatctatccatgtgtgcctgacagttctcctggcactggctggtaacagatgcaaaactgtaaaaattaagtgatcatgtattttaacgatatcatcacatacttattttctatgtaatgttttaaatttcccctaacatactttgactgttttgcacatggtagatattcacatttttttgtgttgaagttgatgcaatcttcaaagttatctaccccattgcttattagtaaaactagtgttaatacttggcaagagatgcagggaatctttctcatgactcacgccctatttagttattaatgctactaccctattttgagtaagtagtaggtccctaagtacattgtccagagttatactgttaaagatatttagccccatatacttcttgaatctaaagtcatacaccttgctcctcatttctgagtgggaaagacatttgagagtatgttgacaattgttctgaaggtttttgccgagaaggtgaaactgtcctttcatctgtgtatgcctggggctgggtccctggcagtgatggggtgacaatgcaaagctgtaaaaactaggtgctagtgggcacctaatatcatcatcatatacttattttcaagctaatatgcaaaatcccatctctgtttttaaactaagtgtagatttcagagaaaatattttgtggttcacataagaaaacagtctactcagcttgacaagtgttttatgttaaattggctggtggtttgaaatgaatcatcttcacataatgttttctttaaaaatattgtgaatttaactctaattcttgttattctgtgtgataataaagaataaactaatttctataaaaaaaaaaaaaaaaagg

SEQ ID NO: 47 - DNA, 4064 bp, Homo sapiens
  ref <308>: DATABASE ACCESSION NUMBER: AL137698
cttcaaagggttgagtctgggggctcatcagaagaggtaatcccaagtgacttggaatctgcaacaggtgggttaggacctcatccttagatattgctttaaccaatttatgggtaagccatagttctgagcagagtcacgtgctcacgcgccccacgtgtagtgacaacgggaatgtaggcttaaacataggtaacagcttcaaaagagtttgtaaaaacaaggctgtgaatatcaatataattgtgagacttttggggatttattgtaggtttgaacgtaacttgaaatacagtgatttgtagacagtcagtaattgcttcacttgctccatttggaattttgtaactattcacttctccagcagcataaggtggttaagaagacagtttctgttcgttgtaaaaaattactccaggcttaaggaggacaattattgtgtctttatattcatatacccaggatttagcacagtgcctaatccataagggccacactaaaatgtttgcccagtgaataaatcctggataatatcatcctgtctgcaaagccagtattacagagtgattggttgccagtaggggagatagctccctttggttacacaaattgtggcagacattgaaccactccaaaagaaactaaagctatttatttggggattgaaacaaaaaagcctacacaacttgaaaaaagcataaagacactcagatggaaccatagtgtctcccagcagatatcaccagatgggggtgggggtaaataattgcagtcacatatgcagcaggtatatatatttttactaatggcttattcttaaacaggacttgaggccagagaaatttcaaggataaattgctttgggagaatgcctgatatcaatgtctcctgagacatagaagttttccaaaataacaaatcaccagatatattattttgttgcctcctcttccttcccctggcccctgccaatatgcttatttacaagagttaccttatcagttgtcttaggagaacacatttccttcaacagaagtcacagtatcatcttatggtcataattttacaatatccctgcctctactgagaagagatacatagcgaatggagatgtgctgagccaatgaggaattaatcctaggcagcactagtagatgtggccacagctctggccccaccccactctggtggtcaggccaaaaaagaagtcaggtaagaagtgtgaaaggaaattcaatcttgggacccccaaactcattaagccacagggaaaattcaagctgggaactgggtcacgcaaacatgcctcccccttttggttcctaaataagatggctacaagatgaaaagctacatgcctcccccatattttgcccacaagggaattcccagtgagctgctagatctttacactaaaggtgtttctattaaaatttcaccatggcaatataaattgatagtttatagatgcagtcacccctggcccaccagacacaaatgcatatctgattgttcccctggcccagttttgtctgttatcttatataaaatgcagattccctgcaattttcctctgcctcatttgtctgtgtcatcttatgttaaaaaaaaatgcagattcactgagccagacaaaggcatgaatgactatttttccctacccacctcttacatgaaaattgtgtacttctcaatatcctgccctttcccctttaaatttggagccttcaaaatcatctttggggaaaggcatagacctgtctcctaggtgtgcatccttaactttggcaaataaacctcctaaaataattgagacttgtcatttttctcgattgacagaagaaaagacagagccaagaggatggcagtgtacttggctacccccagagcctagctgaggctccagccctgggcacttcactggagcattcccttgccagcagaggaacctgcagcctaacctcatgctggggtaaccttaatgtgggcaatccgtcttactgtaatagacaaattgcctgctttcacttaatccacagatttacaagggacaaactttggccctaggaatatttattgaatatcatttcatccttgtgacttccacttctttctgattcccatatcaccagcccaagagaacttgagtatctgttcacagctttgctcctctttccccacattaaccacaaagcaacggaaatagaataaagagacaaatgggtaactctaagtaggttcatcacattcattacatgccctgtatccagagccaatataaatggtcttgattctgattgtgttgaggtataaaaacatgctgatttctgtggcaggtattaatgattattacttgtgtattcatttgctcactgctccattctggatgttcttggtctcagggcctaaggatcattttctcggatgcatcacggctcatcttccggctcagttcctccagtggtgtgcgggccaccctcagactgtacgcagagagctacgagagggatcccagcggccatgaccaggagccacaggcagtgctgagccctctcatagccatcgcactgaaaatatcccagattcatgagagaactggccggaggggacccactgtcatcacctgaatagaggaaagatcactcaccagggccaaagagagtgctcagcgggagatgcttcactgatgccttcttgctacctgtttgtgcctcttatgactttggaaaaacaaaagatattttgcttttgggggatagagggtgggtgggaaaagaaaaaaaatccatttggttttggttttgtcctattcctccaaatgcagcagggcctttagttgtctgttaaagctgcactataatttggtatctacattttatcacacaaaggaacctccccttttgacaacaactgggctaggcagctgttaatcacaacatttgtgcatcacttgtgccaagtgagaaaatgttctaaaatcacaagagagaacagtgccagaatgaaactgaccctaagtcccaggtgcccctgggcaggcagaaggagacactcccagcatggaggagggtttatcttttcatcctaggtcaggtctacaatgggggaaggttttattatagaactcccaacagcccacctcactcctgccacccacccgatggccctgcctcccccatcccatccccaacatccctgtaccaccttctctcacatcttctaaagctttgtacaaatcacaatggtgcacttccaacaaaatatatcaataggtgttttcctctcttattttgtaaatagtattattttagctattaagctggataccttctttcaaattcagccattcagttgtaaagttgggaagaagtttcttgacaagactctgcaattaaatgcttaaaatttggaggggatccttccttgattacatcaagtatgttggtacatgggtttatacaagttcctcttgagaaggcaaaaagaccaccatgtgtgagagctctttgacttggccaataggggcctatcttaatgcacttgtttggacacatttctgatcttatttgtaaaggctgcaaaaggagaggatgaaatgctgtaaaagtaggaaatgaagtggaagctggaagaaaatgtaattggtggtacagctatgggccagatggtggaggggagggtggggacccctgccggcaagcagagtgtcacagctggctttcctcacttgggaaaagggtactgccggtctagcagcctcctctgtactcagccaggacacccagcgcgtgggacctgtttgtgtctgttttgcttccttgggaacggcacagtcactcaccctgccatttgcggaaatgacctggtgcactttgactgttaagcaatgcgttattgctgtagtcaaggttagtgcaagcaaggaaacattcccagtaaggtatttgtttccattttctgtctgtgcttctgtcagaaacttgctaggactttagtggccaataaaaaagaaattcctaatttcaaccttaaaaaaaaaaaaaaaaaaaaaaaaaaaaaaaaaa

SEQ ID NO: 48 - DNA, 2287 bp, Homo sapiens
  ref <308>: DATABASE ACCESSION NUMBER: D00174
gaattccggctggcaggggagaacatggcgctgctctgggggctcctggtgctcagctggtcctgcctgcaaggcccctgctccgtgttctcccctgtgagcgccatggagcccttgggctggcagctaactagcgggccgaaccaggagcaggtgtccccacttaccctcctcaagttgggcaaccaggagcctggtggccagactgccctgaagagtcccccaggagtctgcagcagagaccccaccccagagcagacccacaggctggcccgggccatgatggccttcactgccgacctgttctccctggtggctcaaacgtccacctgccccaacctcatcctgtcacccctgagtgtggccctggcgctgtctcacctggcactaggtgctcagaaccacacgttgcagaggctgcaacaggtgctgcacgcaggctcagggccctgcctcccccatctgctgagccgcctctgccaggacctgggccccggcgcgttccgactggctgccaggatgtacctgcagaaaggatttcccatcaaagaagatttcctggaacaatccgaacagctatttggggcaaagcccgtgagcctgacgggaaagcaggaagatgacctggcaaacatcaaccaatgggtgaaggaggccacggaggggaagattcaggaattcctctctgggctgccggaagacaccgtgttgcttctcctcaacgccatccacttccagggtttctggaggaacaagtttgacccgagccttacccagagagactccttccacctggacgagcagttcacggtgcccgtggaaatgatgcaggcccgcacgtacccgctgcgctggttcttgctggagcagcctgagatccaggtggctcatttcccctttaagaacaacatgagctttgtggtccttgtacccacccactttgaatggaacgtgtcccaggtactggccaacctgagttgggacaccctgcacccacctctggtgtgggagaggcccaccaaggtccggctgcctaagctgtatctgaaacaccaaatggacctggtggccaccctcagccagctgggcctgcaggagttgttccaggccccagacctgcgtgggatctccgagcagagcctggtggtgtccggcgtgcagcatcagtccaccctggagctcagcgaggtcggcgtggaggcggcggcggccaccagcattgccatgtcccgcatgtccctgtcctccttcagcgtgaaccgccccttcctcttcttcatcttcgaggacaccacaggccttcccctcttcgtgggcagcgtgaggaaccccaaccccagtgcaccgcgggagctcaaggaacagcaggattccccgggcaacaaggacttcctccagagcctgaaaggcttcccccgcggagacaagcttttcggccctgacttaaaacttgtgccccccatggaggaggattacccccagtttggcagccccaagtgaggggccgtggctgtggcatccagactccctgcctggaccagcctctccactcatgtgactctttccaacctgctttgtggcactggggcaggggccgggggcagtctgagagaggccattctttcccaacacctcttggggagtttagggtgggggggggcgcggctgggaggagggcaggcatcggggagccgggagcctgaccctcatctttcttccaaacaggctcagagggtgtcctgcaccggggcctgggcaggagggaggtgcttctagttctgccaggagacaggttagctgctccccacgtcagctgggacaccccgacttttgtttaccagagaaaaagggagggggagagggctgcctttggacttgtcccgggacacctaggctagggtggggagagacgggccctggtggtggctcgggaggcgaagcgttgtcctcagccccgcgtggaactcgtgtctggcacagcctggctgtggcctaacctgccgagagtccatcagcctccatcctaccccctgtgccttgtcacgccagacttcccacggctcctcgagatcccaacactgccagcatttcccttccttcctctcctgtctccctcctctgcccgggagctcaggaaccgaggcagggaaggatcccatgagctccttaaggctcttttgtaaggtttttgtagtgatttttatgccacctgaataaagaatgaatgggcaaaaaaaaaaaaaaaaaaaaaaaaaaaaaaaaaaaaaaaaaaaaaaaaaaggaattc

SEQ ID NO: 49 - DNA, 1779 bp, Homo sapiens
  ref <308>: DATABASE ACCESSION NUMBER: D14678
gtgagaggactcaaacgttggaccaagagaaccagcagcttcaggaccagctcagagatgcccagcagcaggtcaaggccctggggacagagcgcacaacactggaggggcatttagccaaggtacaggcccaggctgagcagggccaacaggagctgaagaacttgcgtgcttgtgtcctggagctggaagagcggctgagcacgccaggagggcttggtgcaagagcttcagaaaaaacaggtggaattgcaggaagaacggaggggactgatgtcccaactagaggagaaggagaggaggctgcaacatcagaagcagccctgtcaagcagccaagcagaagtggcatctctgcggcaggagactgtggcccaggcagccttactgactgagcgggaagaacgtcttcatgggctagaaatggagcgccggcgactgcacaaccagctgcaggaactcaagggcaacatccgtgtattctgccgggtccgccctgtcctgccgggggagcccactccaccccctggcctcctcctgtttccctctggccctggtgggccctctgatcctccaacccgccttagcctctcccggtctgacgagcggcgtgggaccctgagtggggcaccagctcccccaactcgccatgatttttcctttgaccgggtattcccaccaggaagtggacaggatgaagtgtttgaagagattgccatgcttgtccagtcagccctggatggctatccagtatgcatctttgcctatggccagacaggcagtggcaagaccttcacaatggagggtgggcctgggggagacccccagttggaggggctgatccctcgggccctgcggcacctcttctctgtggctcaggagctgagtggtcagggctggacctacagctttgtagcaagctacgtagagatctacaatgagactgtccgggacctgctggccactggaacccggaagggtcaagggggcgagtgtgagattcgccgtgcagggccagggagtgaggagctcactgtcaccaatgctcgatatgtccctgtctcctgtgagaaagaagtggacgccctgcttcatctggcccgccagaatcgggctgtggcccgcacagcccagaatgaacggtcatcacgcagccacagtgtattccagctacagatttctggggagcactccagccgaggcctgcagtgtggggcccccctcagtcttgtggacctggccgggagtgagcgacttgaccccggcttagccctcggccccggggagcgggaacgccttcgggaaacacaggccattaacagcagcctgtccacgctggggctggttatcatggccctgagcaacaaggagtcccacgtgccttaccggaacagcaaactgacctacctgctgcagaactctctgggtggtagtgctaagatgctcatgtttgtgaacatttctccactggaagagaacgtctccgagtccctcaactctctacgctttgcctccaaggtgaaccagtgtgttattggtactgctcaggccaacaggaagtgaagacggatccagatctgtgtgtgtgtgtgtgtgtgtgtgtgtgtgtgtgtgtcctatgtctatgtatcgggtgaggggtgggagggttgctggagggtgctttattgggtggagggcaccatgtcccagggctatcaaataaagaatagtttggttttttttttaaataaaggttttattaccatttgcccaagaaggcagatactttcatatctgt

SEQ ID NO: 50 - DNA, 4804 bp, Homo sapiens
  ref <308>: DATABASE ACCESSION NUMBER: D25304
cagaagaacaaatcgtgacatggcttatatctttgggagttttagagtcccctaaaaagaccatctgtgatccggaggagtttttaaagtcctcgctgaaaaatggggtagttctgtgcaaactgatcaacagactcatgcctggctctgtggaaaagttttgtctggatccccaaactgaagctgactgcatcaacaacatcaatgacttcctgaaaggatgtgcaaccctccaagtggaaatatttgatcctgatgacctttattcaggggtcaatttctccaaggtactgagtactcttttagctgtcaacaaagcaacagaagatcagctatcagaaagaccatgtggacgttcctcttctcttagtgctgctaatacttctcagacaaacccacagggagcagtttctagcacagtttcagggctgcaaaggcagtcaaagacagtggagatgacggaaaatggaagtcatcagttgatagtaaaagcaagattcaactttaagcagactaatgaggatgaactgtcagtttgtaagggggacatcatttacgtcacacgagttgaagaaggaggctggtgggaaggcacattaaatgggagaacaggctggttccccagtaattatgtccgtgaaattaaatccagtgagagacctctctccccaaaagccgtcaaaggatttgaaactgctccacttaccaagaattattatactgtggtgttacagaacatcctggacactgaaaaagaatatgctaaagaacttcagtctcttcttgttacttacttaagacccctgcagtccaataacaatctgagtactgtggaggttacatctttactgggaaacttcgaggaagtatgcacatttcaacagacactctgccaagccttggaagaatgttcaaagtttccagaaaaccagcacaaagtaggaggttgtctactgagtctcatgcctcattttaaatctatgtatctggcttactgtgcaaaccatccttcagctgtaaatgtgctcactcagcacagtgatgagttggaacaattcatggaaaatcaaggtgcatcgagcccaggtatcctcattttaacaacaaacctcagcaaaccattcatgcgactggagaaatatgttactctcttgcaagagttagaacggcatatggaggatactcatccagatcatcaggatattctgaaagcaatcgtagcattcaaaactctcatggggcaatgtcaagatctgaggaagagaaaacagctggagttacagatactgtccgaacctattcaggcatgggaaggagaagatattaaaaacttgggaaatgtgatttttatgtcacaagtaatggtgcagtatggagcatgtgaggaaaaagaggagcggtaccttatgttattttcaaatgtcctgataatgttatctgcaagtcctcggatgagtggctttatctatcagggaaaaataccaatagcaggaacggtggtgactagattagatgaaattgaagggaatgactgcacatttgaaatcactggtaacacagtggagagaattgtggtccattgtaacaacaaccaggacttccaggaatggttggagcagctgaacagactgatcagaggacctgcctcttgcagttcattatccaaaacctcatcgtcatcatgtagtgctcattcttcttttagctctaccggacagccccgaggacccttggagcctcctcaaattataaaaccgtggagtttaagttgtctacgacctgcacctccacttagaccatcagcagcactaggttataaagagaggatgtcttatatcttaaaggagtctagtaaaagccctaaaacgatgaagaaatttcttcataaaaggaagactgagagaaaaccatcggaggaggaatatgtgattaggaaaagtacagctgctctggaagaggatgctcaaatccttaaagtgatcgaagcctactgcaccagcgcaaattttcaacaaggccatggctcaagtactcgaaaagattccattccacaagtcctactccctgaggaagagaaactcatcattgaagaaaccagaagcaacggccagaccatcatggaagaaaagagccttgttgatactgtttacgccttgaaggacgaggtcagagaactgaagcaggaaaataaaagaatgaagcaatgcctggaagaagaactgaaatcaagaagggacctagaaaagctggtgcggaggcttttgaagcaaacagatgagtgtattcgaggcgagtccagtagcaagacctcaattcttccataaccatcactgtgccactgggtggagtgtgccttcagggcatcttgaaatgtcccgctgaatgatttgactcagtttgctcacttctttggcttttgttttgtgtttgagtctctctctctctctccctctctcttctctttctctccccgctgtgtgcatatgtgtgtgcgtgcacgtgcgcgcttgggcatttgctgttgtttggttattggttggttgttcattttttttttcaacaggtgaaaaagcaggaagtggtggtagagatggcctcagagtcttttccattcagtaagaaagagaaagggaatgcaggccagttacttaaaaggtcttcagattgccttcagttcacagtgcctctgcaacagccattgccctcaggtcacattctttgggctggctgcccttgcaaagcagctggccaaggcttattaaatgtgaacccaacttttccccagggctttcctgtacctgcaagcctcttagtacttaatttaccgaaggcaaatcttccagactatggcttgagtaggatgaaagacaaacacatctgcccaatgatccagctgcccttccttagaccatcacatgcctcccctcaatcacaggttttaaaattactgccctatgttgtctataagaccaagaaaactgtagtacccttattccttttgtgtcatgtaaattgtaactcaggggggcagaagctctggtcacccacaccaacaccaaatccatcagcaaattctactggacaatcctcccttttagtagcagagttgaccgccttttcccattgcatgataggtttctttccctcattctgcctagtgtgtaagttttctatttccccagtacttttagccaaccttaccaagtggtgtgtaaactagtatgtatgtgctttgcttactttttaaaaaaatgtagttagactgtgaggagttactttatgtacgttgcatattcaaactgtgatgttttatccttcaaaacaatctgcattaagaagatattgtgccctactagacagctttcattcactttattactctctcatatatgctgtgagaagttgtaatattaattggcctctttgggtgggactctaagcagtatttgcagaaatatgcttctggtccaacttgtacatccagaacaaaagggcccctctagtagctgtgtgctggattattcaggactgattaactcaagttgctcattgaatcacatcatccactttatcccagaaactagaactgtgagaaaccaggtttagaagacagtcacagaacagcacacatccaaattcagcgccattgaaagttggcctaaggctcagtgccactcacccctccctccccaaaagacaagagaaatttggccagatggggaaggtcactggaaattgaggccaaagggctgatcagaattgcctttataatatatttgatggatgcctataaatgtgggttttgcaaatattgtttaaaaaccaaacttgaagccaggcatggtggcccacacctgtggtcccagctactcaggaggctgaggtgggaggatcatttgagcccaggaggtcaaggctgcagtgagctgtgatgacaccactgcactccaacctaggtaacagagagacacctctgtctctgaaaaaacaaaacttgaagtttgaaacccccagcttgctgaggagccctttttatttttggtactgagagtctcaaggtcccatagctacatggtacagggctgttgtctgcttgctgcacagcagaaattacaccatccacaggaaatggactatttttgcagtccaacatcagccaaccacacacagccgtgtttggaagctgaagagtaaagaaatttctaggaatggctgttgttctgttttttagcacagccatttagatataacatccttcacttaaaaattaaaaacatcagtactaccaccaccaccaacaacatcaacacagatcttcacatctgcccattctgtggttagtcaatggcttgcaataaatgtgcaaactgcatctataggaaacatttttgtgattacggaatactttagttgattgctgaaaatattgaaaggtcttcattttacagtgatgagtacatatgcatgtttcggggacttggcccttctgatgaggggccctcggtactctggataacgaagcttgtgcagagtggtaaccatgcttacacactaaactataatataaaggaaatgaagccatgttaatctgagagcagtgtcgccatagttgtgttgtttacaatactctataaatgggttcctgttgccctgtaattaaactgctgcccgtagaggcctttcagttccttttctgtccttccccttcttaacacaagctcaaattttctaacttgtttttattttgaagacttttaaaatggacattttcaatacataaaaataaacagtgctttataaaaat

SEQ ID NO: 51 - DNA, 2591 bp, Homo sapiens
  ref <308>: DATABASE ACCESSION NUMBER: D25328
cccggacgtgcggctcccctcggcctcctcgccatggacgcggacgactcccgggcccccaagggctccttgcggaagttcctggagcacctctccggggccggcaaggccatcggcgtgctgaccagcggcggggatgctcaaggtatgaacgctgccgtccgtgccgtggtgcgcatgggtatctacgtgggggccaaggtgtacttcatctacgagggctaccagggcatggtggacggaggctcaaacatcgcagaggccgactgggagagtgtctccagcatcctgcaagtgggcgggacgatcattggcagtgcgcggtgccaggccttccgcacgcgggaaggccgcctgaaggctgcttgcaacctgctgcagcgcggcatcaccaacctgtgtgtgatcggcggggacgggagcctcaccggggccaacctcttccggaaggagtggagtgggctgctggaggagctggccaggaacggccagatcgataaggaggccgtgcagaagtacgcctacctcaacgtggtgggcatggtgggctccatcgacaatgatttctgcggcaccgacatgaccatcggcacggactccgccctgcacaggatcatcgaggtcgtcgacgccatcatgaccacggcccagagccaccagaggaccttcgttctggaggtgatgggacgacactgtgggtacctggccctggtgagtgccttggcctgcggtgcggactgggtgttccttccagaatctccaccagaggaaggctgggaggagcagatgtgtgtcaaactctcggagaaccgtgcccggaaaaaaaggctgaatattattattgtggctgaaggagcaattgatacccaaaataaacccatcacctctgagaaaatcaaagagcttgtcgtcacgcagctgggctatgacacacgtgtgaccatcctcgggcacgtgcagagaggagggaccccttcggcattcgacaggatcttggccagccgcatgggagtggaggcagtcatcgccttgctagaggccaccccggacaccccagcttgcgtcgtgtcactgaacgggaaccacgccgtgcgcctgccgctgatggagtgcgtgcagatgactcaggatgtgcagaaggcgatggacgagaggagatttcaagatgcggttcgactccgagggaggagctttgcgggcaacctgaacacctacaagcgacttgccatcaagctgccggatgatcagatcccaaagaccaattgcaacgtagctgtcatcaacgtgggggcacccgcggctgggatgaacgcggccgtacgctcagctgtgcgcgtgggcattgccgacggccacaggatgctcgccatctatgatggctttgacggcttcgccaagggccagatcaaagaaatcggctggacagatgtcgggggctggaccggccaaggaggctccattcttgggacaaaacgcgttctcccggggaagtacttggaagagatcgccacacagatgcgcacgcacagcatcaacgcgctgctgatcatcggtggattcgaggcctacctgggactcctggagctgtcagccgcccgggagaagcacgaggagttctgtgtccccatggtcatggttcccgctactgtgtccaacaatgtgccgggttccgatttcagcatcggggcagacaccgccctgaacactatcaccgacacctgcgaccgcatcaagcagtccgccagcggaaccaagcggcgcgtgttcatcatcgagaccatgggcggctactgtggctacctggccaacatgggggggctcgcggccggagctgatgccgcatacattttcgaagagcccttcgacatcagggatctgcagtccaacgtggagcacctgacggagaaaatgaagaccaccatccagagaggccttgtgctcagaaatgagagctgcagtgaaaactacaccaccgacttcatttaccagctgtattcagaagagggcaaaggcgtgtttgactgcaggaagaacgtgctgggtcacatgcagcagggtggggcaccctctccatttgatagaaactttggaaccaaaatctctgccagagctatggagtggatcactgcaaaactcaaggaggcccggggcagaggaaaaaaatttaccaccgatgattccatttgtgtgctgggaataagcaaaagaaacgttatttttcaacctgtggcagagctgaagaagcaaacggattttgagcacaggattcccaaagaacagtggtggctcaagctacggcccctcatgaaaatcctggccaagtacaaggccagctatgacgtgtcggactcaggccagctggaacatgtgcagccctggagtgtctgacccagtcccgcctgcatgtgcctgcagccaccgtggactgtctgtttttgtaacacttaagttattttatcagcactttatgcacgtattattgacattaatacctaatcggcgagtgcccatctgccccaccagctccagtgcgtgctgtctgtggagtgtgtctcatgctttcagatgtgcatatgagcagaattaattaa

SEQ ID NO: 52 - DNA, 2726 bp, Homo sapiens
  ref <308>: DATABASE ACCESSION NUMBER: D38553
caggagacgccaaggaaagatgggacctcccggcccagcactgccagccacaatgaataactcttcttcagagacgcgaggacacccccacagtgcctcctctccttcagagcgtgtgttcccgatgcccctgcccaggaaggcgcctctcaatattcctggcaccccagtcctcgaagactttcctcagaatgacgatgagaaggagcggctgcagcggaggcgctcgagggtctttgatctgcagttcagcactgactcacctcgcttattggcctccccctccagcaggagtattgacatttcagctactatccccaagtttacaaacacgcagattacggaacattactccacctgtatcaaactgtccactgaaaataaaatcactaccaagaatgcttttggtttgcacttgattgattttatgtcagagattcttaaacagaaagacaccgaaccaaccaactttaaagtggctgcgggtactctggatgccagcaccaagatctatgctgtgcgcgtggatgccgtccatgccgatgtatacagagtccttggggggctgggcaaagatgcaccgtctttggaagaagtagaaggccatgttgctgatggaagtgctactgaaatgggaacaaccaaaaaggctgtaaagccaaagaagaagcacttacacagaactattgagcagaacataaacaacctcaatgtctccgaagcagatcggaagtgtgagattgatcccatgtttcagaagacagcagcctcatttgatgagtgcagcacagcaggggtgtttctgtccactctccactgccaggactacagaagtgaactgctgtttccctctgatgtccagactctctccacgggagaacctctcgagttgccagagttaggttgtgtagaaatgacagatttaaaagcgcccttgcagcagtgtgcagaagatcgccagatctgcccttccctggccgggttccagtttacacagtgggacagtgaaacacataatgagtctgtgtcggccctggtagacaagtttaagaagaatgaccaggtatttgacatcaatgctgaagttgacgagagtgactgtggagacttccccgatgggtccctgggggatgactttgatgccaacgatgaacctgaccacaccgcagttggggatcatgaagagttcaggagctggaaggagccctgccaggttcagagctgccaggaagaaatgatttcccttggggatggagacatcaggaccatgtgcccccttctgtctatgaaacctggagaatattcttatttcagtcctcggaccatgtcgatgtgggctggcccggatcactggcgctttaggcctcgacgcaaacaagatgctccttcccaatcagaaaacaaaaagaagagtacaaaaaaagattttgaaattgactttgaagatgatattgactttgatgtatattttagaaaaacaaaggctgctactattctgaccaagtccactttggagaaccagaattggagagctaccacccttcctacagatttcaactacaatgttgacactctggtccagcttcacctcaaaccaggcaccaggttacttaagatggcccagggccatagggtagagactgagcattatgaagaaattgaagactatgattacaacaaccctaacgacacctccaacttttgccctggattacaggctgctgacagtgatgatgaagatttggatgacttatttgtgggacctgttgggaactctgacctctcaccttatccttgccatccacctaagacagcacaacagaatggtgacactccagaagcccaaggattagacatcacaacatatggggagtcaaacttggtagctgagcctcagaaggtaaataaaattgaaattcactatgccaagactgccaaaaagatggacatgaagaaactgaagcagagcatgtggagtctgctgacagcgctctccggaaaggaggcagatgcagaggcaaaccacagggaagctggaaaagaagcggccctggcagaagtggctgacgagaagatgcttagcgggctcacgaaggacctgcagaggagcctgccccctgtcatggctcagaacctctccatacctctggcttttgcctgtctcctacatttagccaatgaaaagaatctaaaactggaaggaacagaggacctctctgatgttcttgtgaggcaaggagattgagttcactatggagaagtcagcagcaggaggcccatcccttactcagttgccgggacatccccagtctcgggggaagaagatgccatgggcttatacccaggctgtagccaactaccaacgtgcctgtttgtttgttgctctttccttctctccatcatagtctgggtgccagcgccctgaagctccgtgctcaactgattaaactttactgccctatggtgaccatctaggagaggggagggcagagggggtgagggtactattctggattgagaaaacctatatccattctttatatcaatgtatagttttagtctcctaaattgatctgttattttccaaactattctcttgtagaaaattttccagtgggcacttaatggtgcccttgaagaacttcctaatccatgtacataaaatacatcatatgtacacttataaatgtatatagaatgctcaaaaataaaattcttaataatag

SEQ ID NO: 53 - DNA, 4207 bp, Homo sapiens
  ref <308>: DATABASE ACCESSION NUMBER: D42046
ccccggttccgctgtcttttctgtctacagtttgcgatccccgcgtccaggatggagcagctgaacgaactggagctgctgatggagaagagtttttgggaggaggcggagctgccggcggagctatttcagaagaaagtggtagcttcctttccaagaacagttctgagcacaggaatggataaccggtacctggtgttggcagtcaatactgtacagaacaaagagggaaactgtgaaaagcgcctggtcatcactgcttcacagtcactagaaaataaagaactatgcatccttaggaatgactggtgttctgttccagtagagccaggagatatcattcatttggagggagactgcacatctgacacttggataatagataaagattttggatatttgattctgtatccagacatgctgatttctggcaccagcatagccagtagtattcgatgtatgagaagagctgtcctgagtgaaacttttaggagctctgatccagccacacgccaaatgctaattggtacggttctccatgaggtgtttcaaaaagccataaataatagctttgccccagaaaagctacaagaacttgcttttcaaacaattcaagaaataagacatttgaaggaaatgtaccgcttaaatctaagtcaagatgaaataaaacaagaagtagaggactatcttccttcgttttgtaaatgggcaggagatttcatgcataaaaacacttcgactgacttccctcagatgcagctctctctgccaagtgataatagtaaggataattcaacatgtaacattgaagtcgtgaaaccaatggatattgaagaaagcatttggtcccctaggtttggattgaaaggcaaaatagatgttacagttggtgtgaaaatacatcgagggtataaaacaaaatacaagataatgccgctggaacttaaaactggcaaagaatcaaattctattgaacaccgtagtcaggttgttctgtacactctactaagccaagagagaagagctgatccagaggctggcttgcttctctacctcaagactggtcagatgtaccctgtgcctgccaaccatctagataaaagagaattattaaagctaagaaaccagatggcattctcattgtttcaccgtattagcaaatctgctactagacagaagacacagcttgcttctttgccacaaataattgaggaagagaaaacttgtaaatattgttcacaaattggcaattgtgctctttatagcagagcagttgaacaacagatggattgtagttcagtcccaattgtgatgctgcccaaaatagaagaagaaacccagcatctgaagcaaacacacttagaatatttcagcctttggtgtctaatgttaaccctggagtcacaatcgaaggataataaaaagaatcaccaaaatatctggctaatgcctgcttcggaaatggagaagagtggcagttgcattggaaacctgattagaatggaacatgtaaagatagtttgtgatgggcaatatttacataatttccaatgtaaacatggtgccatacctgtcacaaatctaatggcaggtgacagagttattgtaagtggagaagaaaggtcactgtttgctttgtctagaggatatgtgaaggagattaacatgacaacagtaacttgtttattagacagaaacttgtcggtccttccagaatcaactttgttcagattagaccaagaagaaaaaaattgtgatatagataccccattaggaaatctttccaaattgatggaaaacacgtttgtcagcaaaaaacttcgagatttaattattgactttcgtgaacctcagtttatatcctaccttagttctgttcttccacatgatgcaaaggatacagttgcctgcattctaaagggtttgaataagcctcagaggcaagcgatgaaaaaggtacttctttcaaaagactacacactcatcgtgggtatgcctgggacaggaaaaacaactacgatatgtactctcgtaagaattctctacgcctgtggttttagcgttttgttgaccagctatacacactctgctgttgacaatattcttttgaagttagccaagtttaaaataggatttttgcgtttgggtcagattcagaaggttcatccagctatccagcaatttacagagcaagaaatttgcagatcaaagtccattaaatccttagctcttctagaagaactctacaatagtcaacttatagttgcaacaacatgtatgggaataaaccatccaatattttcccgtaaaatttttgatttttgtattgtggatgaagcctctcaaattagccaaccaatttgtctgggccccctttttttttcacggagatttgtgttagtgggggaccatcagcagcttcctcccctggtgctaaaccgtgaagcaagagctcttggcatgagtgaaagcttattcaagaggctggagcagaataagagtgctgttgtacagttaaccgtgcagtacagaatgaacagtaaaattatgtccttaagtaataagctgacctatgagggcaagctggagtgtggatcagacaaagtggccaatgcagtgataaacctacgtcactttaaagatgtgaagctggaactggaattttatgctgactattctgataatccttggttgatgggagtatttgaacccaacaatcctgtttgtttccttaatacagacaaggttccagcgccagaacaagttgaaaaaggtggtgtgagcaatgtaacagaagccaaactcatagttttcctaacctccatttttgttaaggctggatgcagtccctctgatattggtattattgcaccgtacaggcagcaattaaagatcatcaatgatttattggcacgttctattgggatggtcgaagttaatacagtagacaaataccaaggaagggacaaaagtattgtcctagtatcttttgttagaagtaataaggatggaactgttggtgaactcttgaaagattggcgacgtcttaatgttgctataaccagagccaaacataaactgattcttctggggtgtgtgccctcactaaattgctatcctcctttggagaagctgcttaatcatttaaactcagaaaaattaatcattgatcttccatcaagagaacatgaaagtctttgccacatattgggtgactttcaaagagaataaaacactatttcccttgccttttcatactagggcagtatctcctctagctagtgcccatacagaaaattctatcaccatacaaaatttaatgcagtatttatgttttaaagcacaggtgtaccgaaaactgtgaaaagtctgaatttatgggttctatgcatgcatttttgcctaacctagagaaagagtttgataaatttttaccagctttgaagatggattaacttttgactttgagctttaaacttttaagtcagacatttcaggactaatttgattttgtagatatcattgtaagaactttatttgaaagactgaataaagggatttgatttgttttcatcatttaagcacagtcttgtgatgatgagaacataagtgtgattcttttctgtattttgaggtccctaatccaaagcccattttgctaggattttttctgctatcagatgtgttttcactctaaacctagtcttttatgacatgaattgattacttcctgttaattttctatcctcccttactatcctccttttttgttttcagtattcagtatttcagtattctagagtagattttgatataaaagaaaataattcttacatcatcttttgcaacaaattttgttttctgaattgataataaatttaaaaagttgattcctattttcacatatgttcatatgcccctatgtttgggggtatcactcagttttcccttttttgtgtaaagatgttttgtaaaacaaaattgtctcaaagtgattatattatatatataaaaagtaacagattttaacaaaggttaaaagattcttggggtaacagattcttctggggttggaaatcttccatttctcttgagggttttttttaatgagtgttaaatatgttaaaatttttatttctacctcatgtgtttttttaaattattacttgaagttttttatttaataaattttttctactaatgg

SEQ ID NO: 54 - DNA, 2427 bp, Homo sapiens
  ref <308>: DATABASE ACCESSION NUMBER: D55716
gacgtttcgcgccaatttcggttggccggccacagtccaccgcgcggagattctcagcttccccaggagcaagacctctgagcccgccaagcgcggccgcacggccctcggcagcgatggcactgaaggactacgcgctagagaaggaaaaggttaagaagttcttacaagagttctaccaggatgatgaactcgggaagaagcagttcaagtatgggaaccagttggttcggctggctcatcgggaacaggtggctctgtatgtggacctggacgacgtagccgaggatgaccccgagttggtggactcaatttgtgagaatgccaggcgctacgcgaagctctttgctgatgccgtacaagagctgctgcctcagtacaaggagagggaagtggtaaataaagatgtcctggacgtttacattgagcatcggctaatgatggagcagcggagtcgggaccctgggatggtccgaagcccccagaaccagtaccctgctgaactcatgcgcagatttgagctgtattttcaaggccctagcagcagcaagcctcgtgtgatccgggaagtgcgggctgactctgtggggaagttggtaactgtgcgtggaatcgtcactcgtgtctctgaagtcaaacccaagatggtggtggccacttacacttgtgaccagtgtggggcagagacctaccagccgatccagtctcccactttcatgcctctgatcatgtgcccaagccaggagtgccaaaccaaccgctcaggagggcggctgtatctgcagacacggggctccagattcatcaaattccaggagatgaagatgcaagaacatagtgatcaggtgcctgtgggaaatatccctcgtagtatcacggtgctggtagaaggagagaacacaaggattgcccagcctggagaccacgtcagcgtcactggtattttcttgccaatcctgcgcactgggttccgacaggtggtacagggtttactctcagaaacctacctggaagcccatcggattgtgaagatgaacaagagtgaggatgatgagtctggggctggagagctcaccagggaggagctgaggcaaattgcagaggaggatttctacgaaaagctggcagcttcaatcgccccagaaatatacgggcatgaagatgtgaagaaggcactgctgctcctgctagtcgggggtgtggaccagtctcctcgaggcatgaaaatccggggcaacatcaacatctgtctgatgggggatcctggtgtggccaagtctcagctcctgtcatacattgatcgactggcgcctcgcagccagtacacaacaggccggggctcctcaggagtggggcttacggcagctgtgctgagagactccgtgagtggagaactgaccttagagggtggggccctggtgctggctgaccagggtgtgtgctgcattgatgagttcgacaagatggctgaggccgaccgcacagccatccacgaggtcatggagcagcagaccatctccattgccaaggccggcattctcaccacactcaatgcccgctgctccatcctggctgccgccaaccctgcctacgggcgctacaaccctcgccgcagcctggagcagaacatacagctacctgctgcactgctctcccggtttgacctcctctggctgattcaggaccggcccgaccgagacaatgacctacggttggcccagcacatcacctatgtgcaccagcacagccggcagcccccctcccagtttgaacctctggacatgaagctcatgaggcgttacatagccatgtgccgcgagaagcagcccatggtgccagagtctctggctgactacatcacagcagcatacgtggagatgaggcgagaggcttgggctagtaaggatgccacctatacttctgcccggaccctgctggctatcctgcgcctttccactgctctggcacgtctgagaatggtggatgtggtggagaaagaagatgtgaatgaagccatcaggctaatggagatgtcaaaggactctcttctaggagacaaggggcagacagctaggactcagagaccagcagatgtgatatttgccaccgtccgtgaactggtctcagggggccgaagtgtccggttctctgaggcagagcagcgctgtgtatctcgtggcttcacacccgcccagttccaggcggctctggatgaatatgaggagctcaatgtctggcaggtcaatgcttcccggacacggatcacttttgtctgattccagcctgcttgcaaccctggggtcctcttgttccctgctggcctgccccttgggaaggggcagtgatgcctttgaggggaaggaggagcccctctttctcccatgctgcacttactccttttgctaataaaagtgtttgtagattgtc

SEQ ID NO: 55 - DNA, 6237 bp, Homo sapiens
  ref <308>: DATABASE ACCESSION NUMBER: D86978
ctaagatggcgacgcctttggcggtaaattcggctgctagtctatggggtccttacaaagacatttggcataaagtgggaaatgctctttggagaagacaacctgaagctgttcaccttcttgataagattttgaagaaacacaaacctgacttcatctcattgttcaaaaatccgccaaaaaatgttcaacagcatgagaaggttcagaaagccagtacagagggagtcgccattcagggtcaacagggaactcgacttcttcctgaacagctcattaaagaagcctttattctcagtgacctttttgatattggagaattggcagctgttgagcttcttcttgctggagagcatcaacagccacattttcctggccttaccagaggattagtagctgttcttctgtactgggatggaaagcgatgcattgcgaattccttgaaagccttgatacagtctagacggggaaagacatggaccctagaactcagtccagagctggcttccatgacaacacgctttacagatgagctgatggagcaaggattgacttataaagttcttacgctggtgtcacagattgatgtgaataatgagtttgagaaactacagcgagagagaggtttgggcagtgaaaaacatcgcaaagaggtttctgatctcattaaggagtgcaggcagtctcttgcagaaagcctttttgcctgggcttgccagtcacctttaggcaaagaagacactctcctcctcattggacatttggaaagagtgacagttgaggctaatggctcactggatgcagtgaatctggctcttcttatggcgcttctatactgttttgatatcagttttatagagcaaagcacagaggaacgagatgatatgattcatcaacttccactgttgacagaaaaacagtacattgcaacaattcactctcgtcttcaggactcacagctttggaaactgcctgggctccaagccactgttagacttgcctgggcgctggcattgaggggaatatcccagctacctgatgtgacagctctggcagaattcacagaggcagatgaagcaatggcagaactcgcaattgctgacaacgttttcctgttcctcatggaatctgtagtggtatcagaatacttttatcaggaagaattttatattcgcagagtccataatctcatcacagatttccttgcacttatgccaatgaaggtgaaacagctgaggaatcgggcagatgaagatgctcgaatgattcacatgagtatgcagatgggtaatgaaccccccatttcacttagaagggacctggaacacttaatgcttttgattggcgagctatataaaaagaacccttttcatctggagcttgctctagaatattggtgtcccacagagcctcttcagactccgactatcatgggctcttatctaggggtggctcatcagcggccccctcaacgccaggttgtcttgtcaaagtttgttaggcaaatgggtgacctgttgcctccaactatttatattccttatttgaagatgctccagggattggccaatgggcctcagtgtgcccactactgtttcagcctgctcaaagtcaatggtagtagtcatgttgaaaatattcagggagcaggtggcagtcctgtttcctgggaacatttctttcactccttgatgctttaccacgaacaccttcggaaggatcttccaagtgcagatagtgtccagtaccgtcaccttccttcccgtggcatcacccagaaggagcaagatggattgattgcttttttgcagctcacgtctaccatcattacttggagtgaaaatgctcgcttggccctctgtgaacaccctcagtggacccctgttgtggtgattctgggactcctccaatgcagtattccccctgtcctaaaagctgagctactgaagacactcgcagcttttggaaaatctcctgaaattgctgcttccctctggcagtcattggaatacactcagatactgcagaccgtgaggattccaagccaaaggcaagctattggtattgaggttgaactaaatgaaatagaatcccggtgtgaagaatacccattgactcgggccttttgccagcttattagtactctggtggagagctcatttccttctaatttgggtgctggactgcggccccctggctttgacccttatttgcagttccttagagactctgtgtttctacgattccgtacaagagcttaccggagagcagctgaaaagtgggaagttgctgaggtggttttggaggtgttttataaattgctcagagattatgagcctcagcttgaagattttgtagaccagtttgtggaactacaaggagaagaaatcatagcctataagccacctggatttagtctgatgtatcatctgctgaatgagtcaccaatgttggagcttgctctcagtttactggaagaaggagttaagcagcttgacacctatgccccctttcctgggaaaaaacacctggagaaagcagtacagcattgccttgcacttctcaatcttactctgcaaaaggaaaatctttttatggaccttctaagagagagtcaactggctctaatagtctgtcctttagaacagcttttgcagggaattaatcccagaactaagaaggcagataatgtggtaaacattgccagatacctatatcatggcaatactaatccagaattggcttttgaaagtgccaagatcctctgttgtatctcttgcaactctaatattcagataaagttggttggagatttcacacatgaccagagtataagtcagaaactaatggctggatttgtggagtgtttggattgtgaagatgcagaagaatttgtacgtctggaagagggatcagaacttgaaaagaaattagttgcaattcgtcatgaaacaagaatccacatcttgaatcttctcattacctctctggaatgcaatccacccaatcttgctctctacctgttgggctttgaattgaaaaaacctgtcagtactacaaacctacaagatccaggagtgttaggttgccctcggacatgccttcacgccattctaaacatcttggagaaaggaacggaagggagaacaggcccagtggcggtgcgagaatctcctcagctggctgagctatgttaccaggtcatatatcagttatgtgcatgctctgatacatctggtcctactatgaggtacttgagaaccagccaggatttcttattttcccagttgcagtatctaccattttctaacaaagaatatgaaatatctatgctgaaccagatgtcatggcttatgaaaactgcctcaatagagctaagggtaacctctctgaatcgtcagcggtcacatacccagaggctcctacacctcttactggatgacatgccagtgaaaccatactcagatggtgaaggaggaatagaagatgaaaacaggtctgtttctgggttccttcactttgacactgctacaaaagtacgtcgaaaaattctaaatattcttgactcgattgacttcagtcaggagatccctgagcctttgcagttggatttttttgatcgggcccagattgaacaagttattgctaactgtgaacacaagaatttacggggacagacagtctgcaatgtcaagcttcttcatagggttcttgtagctgaagtaaatgcccttcagggtatggcagccataggacagagacctctactaatggaggaaatcagcactgtacttcagtatgtggtaggaagaaataaattgctgcagtgtcttcatgcaaaacgtcatgctctggagtcgtggaggcaactagtagaaattatactgacagcttgtccccaggacctcattcaggcagaggatcgacaactgattattcgtgatattttacaagatgtgcatgataagatactggatgatgaagctgcgcaagagttaatgcctgtggtcgccggggcagtgttcacactgactgctcacctaagccaggccgtcctcactgaacagaagcaaacatcagtcttgggaccagcagaggcccattacgcttttatgcttgatagttgcttcacctcacctcctcctgaagagaacccattagtgggttttgcttctattggagattcttcactttacatcatattgaagaaactgttagacttcattttgaagacaggtggtggattccaacgagtgaggactcacttgtatggctctctgctttattacttacagattgcccagagacctgatgaaccagacaccttagaagcagccaagaaaaccatgtgggaaaggctgacagcccctgaagatgtatttagcaaattacagcgagaaaacatagccattattgaaagttatggcgccgccctcatggaagtggtctgtcgagatgcttgtgatggtcatgagattggaaggatgctggccctggctctacttgatagaattgtctccgtggataaacagcagcagtggcttttgtatctttctaacagtggctacttgaaggtcctcgtagacagcttggtagaagatgaccgtactttgcagagcttactcaccccacagcctccccttttaaaagcactttatacttatgaatctaaaatggcatttctcacaagagtggcaaagatacagcagggtgcattagagctgctaagatcaggggtgattgtgagactagctcaatgccaagtctatgacatgcgcccagaaacggacccgcagagcatgtttggcatgagagaccctccaatgttcatccctaccccagtggatcgctaccgccagattctcctcccagctctccagctgtgccaggtcatcctcacatctagtatggcccagcacttgcaggcagcagggcaggtattgcagtttcttatttcacattctgataccatacaagcaattctgcgctgtcaggatgttagtgctgggtctttgcaggaattggctctgctgacaggaattataagtaaagcagcacttcctggaatattaagtgaacttgacgttgatgtaaatgaagggtctctaatggagctacagggacatattggaagattccagcgccagtgcttaggactactaagtcgctttggtggctctgacagactgcgtcagtttaaatttcaagacgataatgtggagggagataaagtaagcaagaaagatgagattgaactggctatgcagcagatttgtgccaatgtaatggaatattgccagtcactcatgttacagagttcccctaccttccagcatgctgtgtgtctcttcactcctagcctttcagaaacagttaatagagatggaccgcggcaagatacccaagctccagtggttccatactggcgcctgcctggtttaggcattatcatctacctgctgaaacagagtgctaatgatttcttcagctattatgacagtcatcgacagagtgtcagcaagctacaaaatgtagagcagcttcccccagatgagataaaagagttgtgtcagtctgtgatgcctgctggtgttgataaaatctccactgctcagaaatatgttctagcaagacggcgcttggtgaaggtgatcaacaatcgagctaaactgctttccctttgttcttttatcatagagacctgcctatttattctttggcgccatctggagtactacttgttacattgcatgcccacggattctcaagattccttatttgcctcgagaaccttgtttaaaagcagaagactgcaagattccttcgcctcagaaaccaatctagattttagaagtgggctggctatagtgagccaacatgatttagaccagcttcaggctgatgcaatcaacgcttttggagaatcactacaaaagaaacttctggacattgaaggattatattcaaaagttcgatctcgatatagtttcatacaggctcttgtcagacgtatccgtggcctcttgaggatatcaaggaactgagagcccgtgcttatgctcttctatgagagagatgaattggggagaattgtctccattttatagattagtttctttctaaattatgaccaaaaatattttgctatttctttctttgtatatggacatcttttctgtaaacttcttcccctagttccatcctcactagtaaaaaataaatactttttaaaaaaac

SEQ ID NO: 56 - DNA, 5217 bp, Homo sapiens
  ref <308>: DATABASE ACCESSION NUMBER: D86980
ctcggggccacggtccccccgcagcgctagtcccgggcccgcgagcaccggcccccgccacccgcaggttgcggagggaggagggcgggagcgggcggcgcggagccgggaggcgggggaggggccggcgtccgaggcggcggcggcggcggctggagcagcctctggcagcagcggggagaatgggagtgcggggcgccagaccgccgcggggtgtcacggccgccacgaagcctgcgaggcgcggggccggcgcccgcggcttttaaacccgggaaggcgcggcggcggcggcggcggcgggcagatcgcggcgcgcaccaggcgccggggcggcggccgaatggagagaaagggctcggcggccggggccaaggggaacccgagcccgcccgcggccggagaggggcagcggccaccgccgccgctgtgcgtcccgggcggcggcggaggagccccagcgaggggccaggtcggggcggcggccgagccggccgagctcatccgacgagcgcacgagttcaaaagccaaggggcgcagtgctacaaggacaagaaattccgtgaagccataggcaaataccaccgggcgttgctggagctgaaggggctgctgccgccccccggggaacgggagcgggactcgcgcgcggcctccccggctggggccctgaagcccggccgcctctcggaggagcagagcaagacggtggaagccatcgagatcgactgttacaacagcctggcagcctgcctgctccaggctgagctggtaaactatgaacgagtcaaggaatattgcctcaaagtcttgaagaaggaaggggagaacttcaaggccctttaccggtctggtgtggccttctaccaccttggggactatgacaaagcactctactacctgaaagaagcaaggacccaacaaccaacagacaccaacgtgattcggtatatccagctgacggagatgaaactcagccgatgctcccagagagaaaaagaagccatgtaaccaggaagcagctccagagctgcgcccacgcctgaccggggacttccaggcatcccctggcagagagccccgtcctggattctgtccctttctccccacttcttctggctcctcatttttcctcctgttgcaccccagctctttgtctcctcccagtacgaaaaggagagatgcaaatttggaatctggtaggtcgcccagacaatggagacatcctctcctctagcaggtcagcgactgagaggggcctgacttctgctgggacagctggagaggagtctcatgggctgggatgctgttgtggctttgactttggccagtgcttctgacagaggcggagcctggcaagtgtaccatcccacaggcagcaggcacacagcccatgggctggatccttccacactttcctgacagaccagaaccagagcatctcgaggcaactgttagaaatccagggacgagacaaacagagaagcgctggtgaagccaacatagagactgtcaatgtgtacactggagttcccacccccaccccccacccgtcacttagcccctgcctccttcccccactcgttgtcttggcttgtgctttctcctctccccatcggggatccgagactctgccaggattcacatgccactgaagcccactcagtgccctctggtgaccacacataccattcccccggactcccacccagcaggcagctgtgaccgcagaagggcaggatgaagtgggccaaggtttgggacaggttgactgtgtaggtgacagggagggaaagatgatggccaggggaaagagcatcgtataggctaggggattgaactgtggactgattccgtgtaaataaaaataaattaacaggtagtagttcctgtcagttctgttggaagcagcccactccctcacttttactccttcctccaaccctcaatcagagctacttacagccaggcaggatggggctttccccaaagcaattggccgtttgtccagtggcagacaatggtggctacagcctttgtgcttttaagagtgggctgggattgtggagactgcccaggggcttggctttgtcagaacttgtacaatcttcttttgatgaaattatctgaactcaacatctagcacatagaatgtgttcaacaaatgcttgttgaatgaataaattatgactgcagactggctctcctgccttaaactaatttcatcccagcctagtctcctgatgtctgtgctcgttatgctatgccatgttgcttcagtcaaacaagaaacacttactgagggcatattgtttgcccatcattgtgcaatatgctgtgggacatgggatgtcgtctcagtcttcaaggaaatggaagggttaagaaatgcatatgagattattaccaatgacacctttaatttatatgatgctttaaaattatcagagcactttcatgtatttttcgtgtgactagtgaaaaagacaatgttgtacaaaattaaaatatatacagatgcaataatgtgaatagttaggatttattaaatgcattatcttcagatctttacatgtataatctcatttctttcatgcagttactctgggatactgttcccatttgatgggtaagaatattgaaaaccagaaaaattaattatcccaaggttgcatggcctttagtggcatagctaggatttgaaccaggcctgcctgactccagagctctggctagtatctatgctatacttagttgcctctctataagtataatattgggcaattataaccatttgagaacaggacaatatgtattaacctgaaaagtgttcatgatgtcagtgatagtacatggcctccttatgtatttactcaagggccccaaaagaccagaggccagaatccctagtagtcagagcagtgacaggtcagaaaaaggcagctgaggtccaatagttatgtctgtgtattgctcattctacttactgatggagccagcatgtatctcaacaactcacctagcattcatcacccatccccagcattgggaaagggtcacaattaagaccgaaaggaaacacaaagttaaatatgggttaattatgtaagcagatgccccaccacggcaggatccaatcacagccgaggggcccagaagagagcagcgtaagttatattcacatagttccccaaaggctttcaacgggggctacaggaaggtgctagaaatattgaggggcctgccattactcacctagagctcactctctggagaagaggaaaaggaagaagctatttccgctgccacattctccccaatccctactatattatgctgtctttcctcttcctcctagctggctttacatgaccctaacccaaaactaccctatggccccacacgggaatgtgttcaaacgccccgacccccacccccacccccattcccaagcctccaacttagaacgtttgtgatttggcagatggtttgttaggatctgaaggatgaagagaagggtagaggtcacctggagaatgagttcaaactgccagggtcttcccttggtctttgtgcgtcaggaaggactccgagtaattattccctatgcagagacaggagagaggtcttgtttacatgagtgtgctggggcagggctggacaatccaggatatgattgtagccatcccatgtagaaagatcaaaaaccagaacgaaatgaagacagcctctcagaacctcatagaacaagcgtccaggtcatctgcttgtttggtgacttagatatacaggcttactggaactccattcactgtgacctgaagttaaataatcccaaagagaaaaagctacctggggtattggttgatgtttggggtgatagggctgaattttctgtgcatttgtccaacaaaggctttagagcacaaaaccaggttcattctccctaccaaatcttcagcttccttctcctcatccctccccaaaacaagaactgtgatttaattccgtacgttgcggatgtcactgctgacctatgtagctggagtactaatcaggcatctgacctgcactgtcatcccctgcctggacttttgcgatggactctttgggggaaaaactaacgctttttaattattgtgaaagcatcatgtgtgtattgtagaagttttaggaaaaaaaggacaaaatccaatccataagcttaccacccaagacaaacgtgtattcttttgaatataccttttagttctttttggtgtaaatgtacacacgcacacacagttgtggatttttttaaacaaaaactggatacactgaatatactctttaataacttttcaagtgtgtatttatattttagaatatgtaatcctacacagatacaaaattcaaaaagtacaaactgctctgtagtcagaagtaaatcttctccctaccccgtctgccagcatctagtttccctctaatttattttgcatcctagtggagatgcttacacattgtcaaacatatgtatatattcttttatcacacacaaatggcagcatattggacactttttgttttttgctccttctgttccttcacttaataatatcacgaacattttcggcatatcaaactttctcaacagcatcttcattgtatggatggaccctttttttatcatcaatcctcaaatagtgattatttcatttgttcccaatcttcattgtaaatagtgttgcaactgacattcttgtagctaaattttgcacatgtctataacgatttccttaggataaactccaagaagagacttgcttggctatttttaagaattttgatacatgttgccaaccaccctccagaaagtttgtaccaaaacgctctcctatttggatcctagagagtaccctgtttcctgcaccctaacactaggtatcatcacttatcaaatctttcccaatttggtagctgggataatagtatgtcaatgttattttaactttctttgattcttcgcgaataacattttcatatgcttattgaccatttgtacttctttctttgtgaattttctatttatttgatattggtatgtttattatcaatttgtaattttattaagaatattatttttgtcaagaaatgctgcaaatatgctttccaagtgctttgctttcaaattttgtttatggtgctttttgacatacataaattcttaattctgc

SEQ ID NO: 57 - DNA, 2250 bp, Homo sapiens
  ref <308>: DATABASE ACCESSION NUMBER: L19778
tgtggttgctcgtagtgagttgcgctcgctatgtctggacgtggcaagcagggaggcaaagcccgcgctaaggccaagactcgctcttctagggccggtctccagttccccgtgggccgagtgcaccgcctgctccgcaaaggcaactatgccgagcgggtcggggccggcgcgccggtgtatctggcagcggtgctggagtacctgaccgccgagatcctggaactggcgggcaacgcggcccgcgacaacaagaagacccgcatcatcccgcgtcatctccaactggccatccgcaacgacgaggagctcaacaagctgctgggcaaagtcaccatcgcacagggcggtgtcctgcccaacattcaggccgtgctactgcccaaaaagactgagagccaccacaaggcgaagggcaagtaactatctgtactagtttgtggcagctcaagtaaaatcgagtccaaaccaacggctcttttcagggccacccacgtcttctctaaaagaacttaacatttattccatgtgaaagaaagtgagacatggacaagactctagtcataaattacccatctttttgaaaacagtgtagcgaacaccgcagatttaaaagaaaaactagagggaaggtggtccagattttaccacgcttaaaagttaagatgtgaacaaatctcttaggccattacttaattttaaacttaatcagtgtgtgtccacagagcaccagtggcttcgtgagttcttgaagcactttggcccaaaagagttatcgcccgggctagaatttagcagacagctgttccacgcgggccagggcggcatgaagaagtcccgccgctactggcccggcacagtggccctgcgcgacgttcggcgctaccagaactccgagctgctgatcagcaagctgccgctcctgcgagagctcggcggtgacgccgctgcacgagagcgaggctgaagaactttgtgacacaatagtccacctccctgcaaggctctgtcagagactcacatctttcctgatggatagctgtgaagcattctcttacccaccctactgcatgttgcaaagtattcctttaaaatgaagtgagtaaaatactgggatgacgttatctggagccaagaagatggctcatttggaaaggcctaatatcccaagttgcttacctagaagaacttgacaggatagttaataataaaccttaaaacccatgaagaaatctgaggtaaagtgttagcacacagactgttaaaatgtctgcctcacagataggagggaaaatatatagaggattataatatggttcaacaaatgttgatgagtattagaaatgtacattagaaatattagaaatgtttatgactattagaaaagtacagggtattgggcgttcctgacacaaactgaggcctcctagcaagactggcagttttctgtaaaggagggttatttactacggtagtgcaaataacttttggtgttgtagctaaataaggaatactcatgccaagatcatcgaattgtgcctcctccctctgttcactgaactctgatgtaattttttttttttttttttgagacggagtctcgctctgtcgcccaggctggagtgcagtgggcgctatctcggctcactgcaagctccgcctcccgggttcacgccattctcctgcctcagcctcctgagtagctggggctacaggcgtctgccaccatgcccagctacttttttgtatttttagtagatacggggtttcaccgtgttagccaggatggtcttgatgtcctgacctcgtgatccaccggcctcggcctcccaaagtgctgggattaccggcgtaagccaccacgcccggcccactctgaagtaatcttaagaagacgttaactcatttttcttgtgtattgtagacacttttggctgtctggtaacatggaaaatctcagaatgatgttttaagtatataaaatgccaaacaaagttaaattacagttatcaaagtatttttaaaacttcatagtgataaatgagactatatagttatattgttaatatagttaacacattacatgatttggtgagcctaattgctgttactaattagaggagtaaaaatgtttcacgataactcagcaattgtaatgagaaatgaaacatctaatgtcttttgggttacaaagtaacaggtactgagatttgtggcctaaattcataataaagtgaaatgttcaagttc

SEQ ID NO: 58 - DNA, 1777 bp, Homo sapiens
  ref <308>: DATABASE ACCESSION NUMBER: L25080
ggctaccctcgccccgcccgcggtcctccgtcggttctctcattagtccacggtctggtcttcagctacccgccttcgtctccgagtttgcgactcgcgggaccggcgtccccggcgcgaagaggctggactcggattcgttgcctgagcaatggctgccatccggaagaaactggtgattgttggtgatggagcctgtggaaagacatgcttgctcatagtcttcagcaaggaccagttcccagaggtgtatgtgcccacagtgtttgagaactatgtggcagatatcgaggtggatggaaagcaggtagagttggctttgtgggacacagctgggcaggaagattatgatcgcctgaggcccctctcctacccagataccgatgttatactgatgtgtttttccatcgacagccctgatagtttagaaaacatcccagaaaagtggaccccagaagtcaagcatttctgtcccaacgtgcccatcatcctggttgggaataagaaggatcttcggaatgatgagcacacaaggcgggagctagccaagatgaagcaggagccggtgaaacctgaagaaggcagagatatggcaaacaggattggcgcttttgggtacatggagtgttcagcaaagaccaaagatggagtgagagaggtttttgaaatggctacgagagctgctctgcaagctagacgtgggaagaaaaaatctggttgccttgtcttgtgaaaccttgctgcaagcacagcccttatgcggttaattttgaagtgctgtttattaatcttagtgtatgattactggcctttttcatttatctataatttacctaagattacaaatcagaagtcatcttgctaccagtatttagaagccaactatgattattaacgatgtccaacccgtctggcccaccagggtccttttgacactgctctaacagccctcctctgcactcccacctgacacaccaggcgctaattcaaggaatttcttaacttcttgcttctttctagaaagagaaacagttggtaacttttgtcaattaggctgtaactactttataactaacatgtcctgccctattatctgtcagctgcaaggtactctggtgagtcaccacttcagggctttactccgtaacagattttgttggcatagctctggggtgggcagttttgaaaatgggctcaaccagaaaagcccaagttcatgcagctgtggcagagttacagttctgtggtttcatgttagttaccttatagttactgtgtaattagtgccacttaatgtatgttaccaaaaataaatatatctacccagactagatgtagtattttgtataattggattctaatactgtcatctcaagaagtgtatggtttaaagaagtgtattggaaataaagtcagatggaaattcattttaaattcccgtttgtcacttttctgataaaagatggccatattaccccttttcggccccatgtatctcagtaccccatggagctgggctaagtaaataggaattggtttcacgcctcaggcaattagacactttggaagatggcataacctgtctcacctggacttaagcgtctggctctaattcacagtgctctttctcctcactgtatccaggttccctcccagaggagccaccagttctcatgggtggcactcagtctctcttctctccagctgactaaactttttttctgtaccagttaatttttccaactactaatagaataaaggcagttttctaaaaaaa

SEQ ID NO: 59 - DNA, 1145 bp, Homo sapiens
  ref <308>: DATABASE ACCESSION NUMBER: L35035
gctggctatgctagtcgcttcatcgtgatcgctgatttcaggaaagattcgaagaatctcggggtacagtggcacaagggaatccccatcgaggtcatcccaatggcctatgtcccagtgagccgagctgtgagccagaagtttgggggcgtggttgaagttcgaatggctgtcaacaaggctggtcctgtggtgacagataatgggaattttatcttggactggaagtttgaccgggtacacaaatggagtgaagtgaatacagctatcaaaatgatcccaggcgtggtggacacaggcctattcatcaacatggctgagagagtctactttgggatgcaggatggctcagtgaacatgagggagaagcctttctgttgaccctgcaaggagcagagtgtgttcaccttgagtctccagcccacagccaaggtggacgtacctctccaggagcctttgccttaatgtatctctgcctggacaacttgtggtgggggggtggggggaatgagtgggagggggagttaaatccagtcttatgaagtattgttattaaatgtctttttaaaaagagaaatataaacatatatttttactattaaaatattcagttttttaaatgaagtagaacttgagttcatgttttatatgaaatatttaccaaaaaaaaaaatgaggtaaactgtatttaaaacctttgacttgagtctgctggtaaagcttgttacttgtctgctaccctctgatttgtttttagttagttttattgtgagcacacatagtacctagttacatcttaagatcaggtttataaaactgtggagtggagcggtatggtatggaatgacttggaatgtaagctgtcagggagaaaatgttgttacacttttgctaagatctgggggtttcttcatattcctgctgttggaagcagttgaccagaaatgcttgccagtactgccaaagcactgctgtgaaatgtgaagtactttgttttttttatttttaatgattttctttttgttattaatatttttctctgttcctttgttattacttgcatggtttggcgtcagaagtcctacctctttatattgtttgcaggtttaaataaaacagtgtggtgccaaaaaaaaaaggaattc

SEQ ID NO: 60 - DNA, 2517 bp, Homo sapiens
  ref <308>: DATABASE ACCESSION NUMBER: M96577
ggaattccgtggccgggactttgcaggcagcggcggccgggggcggagcgggatcgagccctcgccgaggcctgccgccatgggcccgcgccgccgccgccgcctgtcacccgggccgcgcgggccgtgagcgtcatggccttggccggggcccctgcgggcggcccatgcgcgccggcgctggaggccctgctcggggccggcgcgctgcggctgctcgactcctcgcagatcgtcatcatctccgccgcgcaggacgccagcgccccgccggctcccaccggccccgcggcgcccgccgccggcccctgcgaccctgacctgctgctcttcgccacaccgcaggcgccccggcccacacccagtgcgccgcggcccgcgctcggccgcccgccggtgaagcggaggctggacctggaaactgaccatcagtacctggccgagagcagtgggccagctcggggcagaggccgccatccaggaaaaggtgtgaaatccccgggggagaagtcacgctatgagacctcactgaatctgaccaccaagcgcttcctggagctgctgagccactcggctgacggtgtcgtcgacctgaactgggctgccgaggtgctgaaggtgcagaagcggcgcatctatgacatcaccaacgtccttgagggcatccagctcattgccaagaagtccaagaaccacatccagtggctgggcagccacaccacagtgggcgtcggcggacggcttgaggggttgacccaggacctccgacagctgcaggagagcgagcagcagctggaccacctgatgaatatctgtactacgcagctgcgcctgctctccgaggacactgacagccagcgcctggcctacgtgacgtgtcaggaccttcgtagcattgcagaccctgcagagcagatggttatggtgatcaaagcccctcctgagacccagctccaagccgtggactcttcggagaactttcagatctcccttaagagcaaacaaggcccgatcgatgttttcctgtgccctgaggagaccgtaggtgggatcagccctgggaagaccccatcccaggaggtcacttctgaggaggagaacagggccactgactctgccaccatagtgtcaccaccaccatcatctcccccctcatccctcaccacagatcccagccagtctctactcagcctggagcaagaaccgctgttgtcccggatgggcagcctgcgggctcccgtggacgaggaccgcctgtccccgctggtggcggccgactcgctcctggagcatgtgcgggaggacttctccggcctcctccctgaggagttcatcagcctttccccaccccacgaggccctcgactaccacttcggcctcgaggagggcgagggcatcagagacctcttcgactgtgactttggggacctcacccccctggatttctgacagggcttggagggaccagggtttccagagtagctcaccttgtctctgcagccctggagccccctgtccctggccgtcctcccagcctgtttggaaacatttaatttatacccctctcctctgtctccagaagcttctagctctggggtctggctaccgctaggaggctgagcaagccaggaagggaaggagtctgtgtggtgtgtatgtgcatgcagcctacacccacacgtgtgtaccgggggtgaatgtgtgtgagcatgtgtgtgtgcatgtaccggggaatgaaggtgaacatacacctctgtgtgtgcactgcagacacgccccagtgtgtccacatgtgtgtgcatgagtccatctctgcgcgtgggggggctctaactgcactttcggcccttttgctcgtggggtcccacaaggcccagggcagtgcctgctcccagaatctggtgctctgaccaggccaggtggggaggctttggctggctgggcgtgtaggacggtgagagcacttctgtcttaaaggttttttctgattgaagctttaatggagcgttatttatttatcgaggcctctttggtgagcctggggaatcagcaaaaggggaggaggggtgtggggttgataccccaactccctctacccttgagcaagggcaggggtccctgagctgttcttctgccccatactgaaggaactgaggcctgggtgatttatttattgggaaagtgagggagggagacagactgactgacagccatgggtggtcagatggtggggtgggccctctccagggggccagttcagggcccagctgccccccaggatggatatgagatgggagaggtgagtgggggaccttcactgatgtgggcaggaggggtggtgaaggcctcccccagcccagaccctgtggtccctcctgcagtgtctgaagcgcctgcctccccactgctctgccccaccctccaatctgcactttgatttgcttcctaacagctctgttccctcctgctttggttttaataaatattttgatgacgttaaaaaaaggaattcgatat

SEQ ID NO: 61 - DNA, 4577 bp, Homo sapiens
  ref <308>: DATABASE ACCESSION NUMBER: NM_000014
gctacaatccatctggtctcctccagctccttctttctgcaacatggggaagaacaaactccttcatccaagtctggttcttctcctcttggtcctcctgcccacagacgcctcagtctctggaaaaccgcagtatatggttctggtcccctccctgctccacactgagaccactgagaagggctgtgtccttctgagctacctgaatgagacagtgactgtaagtgcttccttggagtctgtcaggggaaacaggagcctcttcactgacctggaggcggagaatgacgtactccactgtgtcgccttcgctgtcccaaagtcttcatccaatgaggaggtaatgttcctcactgtccaagtgaaaggaccaacccaagaatttaagaagcggaccacagtgatggttaagaacgaggacagtctggtctttgtccagacagacaaatcaatctacaaaccagggcagacagtgaaatttcgtgttgtctccatggatgaaaactttcaccccctgaatgagttgattccactagtatacattcaggatcccaaaggaaatcgcatcgcacaatggcagagtttccagttagagggtggcctcaagcaattttcttttcccctctcatcagagcccttccagggctcctacaaggtggtggtacagaagaaatcaggtggaaggacagagcaccctttcaccgtggaggaatttgttcttcccaagtttgaagtacaagtaacagtgccaaagataatcaccatcttggaagaagagatgaatgtatcagtgtgtggcctatacacatatgggaagcctgtccctggacatgtgactgtgagcatttgcagaaagtatagtgacgcttccgactgccacggtgaagattcacaggctttctgtgagaaattcagtggacagctaaacagccatggctgcttctatcagcaagtaaaaaccaaggtcttccagctgaagaggaaggagtatgaaatgaaacttcacactgaggcccagatccaagaagaaggaacagtggtggaattgactggaaggcagtccagtgaaatcacaagaaccataaccaaactctcatttgtgaaagtggactcacactttcgacagggaattcccttctttgggcaggtgcgcctagtagatgggaaaggcgtccctataccaaataaagtcatattcatcagaggaaatgaagcaaactattactccaatgctaccacggatgagcatggccttgtacagttctctatcaacaccaccaacgttatgggtacctctcttactgttagggtcaattacaaggatcgtagtccctgttacggctaccagtgggtgtcagaagaacacgaagaggcacatcacactgcttatcttgtgttctccccaagcaagagctttgtccaccttgagcccatgtctcatgaactaccctgtggccatactcagacagtccaggcacattatattctgaatggaggcaccctgctggggctgaagaagctctccttttattatctgataatggcaaagggaggcattgtccgaactgggactcatggactgcttgtgaagcaggaagacatgaagggccatttttccatctcaatccctgtgaagtcagacattgctcctgtcgctcggttgctcatctatgctgttttacctaccggggacgtgattggggattctgcaaaatatgatgttgaaaattgtctggccaacaaggtggatttgagcttcagcccatcacaaagtctcccagcctcacacgcccacctgcgagtcacagcggctcctcagtccgtctgcgccctccgtgctgtggaccaaagcgtgctgctcatgaagcctgatgctgagctctcggcgtcctcggtttacaacctgctaccagaaaaggacctcactggcttccctgggcctttgaatgaccaggacgatgaagactgcatcaatcgtcataatgtctatattaatggaatcacatatactccagtatcaagtacaaatgaaaaggatatgtacagcttcctagaggacatgggcttaaaggcattcaccaactcaaagattcgtaaacccaaaatgtgtccacagcttcaacagtatgaaatgcatggacctgaaggtctacgtgtaggtttttatgagtcagatgtaatgggaagaggccatgcacgcctggtgcatgttgaagagcctcacacggagaccgtacgaaagtacttccctgagacatggatctgggatttggtggtggtaaactcagcaggggtggctgaggtaggagtaacagtccctgacaccatcaccgagtggaaggcaggggccttctgcctgtctgaagatgctggacttggtatctcttccactgcctctctccgagccttccagcccttctttgtggagcttacaatgccttactctgtgattcgtggagaggccttcacactcaaggccacggtcctaaactaccttcccaaatgcatccgggtcagtgtgcagctggaagcctctcccgccttccttgctgtcccagtggagaaggaacaagcgcctcactgcatctgtgcaaacgggcggcaaactgtgtcctgggcagtaaccccaaagtcattaggaaatgtgaatttcactgtgagcgcagaggcactagagtctcaagagctgtgtgggactgaggtgccttcagttcctgaacacggaaggaaagacacagtcatcaagcctctgttggttgaacctgaaggactagagaaggaaacaacattcaactccctactttgtccatcaggtggtgaggtttctgaagaattatccctgaaactgccaccaaatgtggtagaagaatctgcccgagcttctgtctcagttttgggagacatattaggctctgccatgcaaaacacacaaaatcttctccagatgccctatggctgtggagagcagaatatggtcctctttgctcctaacatctatgtactggattatctaaatgaaacacagcagcttactccagaggtcaagtccaaggccattggctatctcaacactggttaccagagacagttgaactacaaacactatgatggctcctacagcacctttggggagcgatatggcaggaaccagggcaacacctggctcacagcctttgttctgaagacttttgcccaagctcgagcctacatcttcatcgatgaagcacacattacccaagccctcatatggctctcccagaggcagaaggacaatggctgtttcaggagctctgggtcactgctcaacaatgccataaagggaggagtagaagatgaagtgaccctctccgcctatatcaccatcgcccttctggagattcctctcacagtcactcaccctgttgtccgcaatgccctgttttgcctggagtcagcctggaagacagcacaagaaggggaccatggcagccatgtatataccaaagcactgctggcctatgcttttgccctggcaggtaaccaggacaagaggaaggaagtactcaagtcacttaatgaggaagctgtgaagaaagacaactctgtccattgggagcgccctcagaaacccaaggcaccagtggggcatttttacgaaccccaggctccctctgctgaggtggagatgacatcctatgtgctcctcgcttatctcacggcccagccagccccaacctcggaggacctgacctctgcaaccaacatcgtgaagtggatcacgaagcagcagaatgcccagggcggtttctcctccacccaggacacagtggtggctctccatgctctgtccaaatatggagccgccacatttaccaggactgggaaggctgcacaggtgactatccagtcttcagggacattttccagcaaattccaagtggacaacaacaatcgcctgttactgcagcaggtctcattgccagagctgcctggggaatacagcatgaaagtgacaggagaaggatgtgtctacctccagacctccttgaaatacaatattctcccagaaaaggaagagttcccctttgctttaggagtgcagactctgcctcaaacttgtgatgaacccaaagcccacaccagcttccaaatctccctaagtgtcagttacacagggagccgctctgcctccaacatggcgatcgttgatgtgaagatggtctctggcttcattcccctgaagccaacagtgaaaatgcttgaaagatctaaccatgtgagccggacagaagtcagcagcaaccatgtcttgatttaccttgataaggtgtcaaatcagacactgagcttgttcttcacggttctgcaagatgtcccagtaagagatctcaaaccagccatagtgaaagtctatgattactacgagacggatgagtttgcaatcgctgagtacaatgctccttgcagcaaagatcttggaaatgcttgaagaccacaaggctgaaaagtgctttgctggagtcctgttctctgagctccacagaagacacgtgtttttgtatctttaaagacttgatgaataaacactttttctggtc

SEQ ID NO: 62 - DNA, 1511 bp, Homo sapiens
  ref <308>: DATABASE ACCESSION NUMBER: NM_000076
gaattccgggcacccctcgagcgagcgagctagccagcaggcatcgagggggcgcggctgccgtccggacgagacaggcgaacccgacgcagaagagtccaccaccggacagtcaggtagccgccgcgtccctcgcacacgcagagtcgggcggcgcggggtctcccttgcgcccggcctccgccctctcctcctctcctttccccttcttctcgctgtcctctcctctctcgctgcccgcgtttgcgcagccccgggccatgtccgacgcgtccctccgcagcacatccacgatggagcgtcttgtcgcccgtgggaccttcccagtactagtgcgcaccagcgcctgccgcagcctcttcgggccggtggaccacgaggagctgagccgcgagctgcaggcccgcctggccgagctgaacgccgaggaccagaaccgctgggattacgacttccagcaggacatgccgctgcggggccctggacgcctgcagtggaccgaagtggacagcgactcggtgcccgcgttctaccgcgagacggtgcaggtggggcgctgccgcctgctgctggcgccgcggcccgtcgcggtcgcggtggctgtcagcccgcccctcgagccggccgctgagtccctcgacggcctcgaggaggcgccggagcagctgcctagtgtcccggtcccggccccggcgtccaccccgcccccagtcccggtcctggctccagccccggccccggctccggctccggtcgcggctccggtcgcggctccggtcgcggtcgcggtcctggccccggccccggccccggccccggctccggctccggccccggctccagtcgcggccccggccccagccccggccccggccccggccccggcccccgccccggccccggccccggacgcggcgcctcaagagagcgccgagcagggcgcgaaccaggggcagcgcggccaggagcctctcgctgaccagctgcactcggggatttcgggacgtcccgcggccggcaccgcggccgccagcgccaacggcgcggcgatcaagaagctgtccgggcctctgatctccgatttcttcgccaagcgcaagagatcagcgcctgagaagtcgtcgggcgatgtccccgcgccgtgtccctctccaagcgccgcccctggcgtgggctcggtggagcagaccccgcgcaagaggctgcggtgagccaatttagagcccaaagagccccgagggaacctgccggggcagcggacgttggaagggcgctgggcctcggctgggaccgttcatgtagcagcaaccggcggcggctgccgcagagcagcgttcggttttgtttttaaattttgaaaactgtgcaatgtattaataacgtctttttatatctaaatgtattctgcacgagaaggtacactggtcccaaagtgtaaagctttaagagtcatttatataaaatgtttaatctctgctgaaactcagtacaaaaaaaccgggattccggcc

SEQ ID NO: 63 - DNA, 14069 bp, Homo sapiens
  ref <308>: DATABASE ACCESSION NUMBER: NM_000109
cgttaaatgcaaacgctgctctggctcatgtgtttgctccgaggtataggttttgttcgactgacgtatcagatagtcagagtggttaccacaccgacgttgtagcagctgcataataaatgactgaaagaatcatgttaggcatgcccacctaacctaacttgaatcatgcgaaaggggagctgttggaattcaaatagactttctggttcccagcagtcggcagtaatagaatgctttcaggaagatgacagaatcaggagaaagatgctgttttgcactatcttgatttgttacagcagccaacttattggcatgatggagtgacaggaaaaacagctggcatggaagatgaaagagaagatgttcaaaagaaaacattcacaaaatgggtaaatgcacaattttctaagtttgggaagcagcatattgagaacctcttcagtgacctacaggatgggaggcgcctcctagacctcctcgaaggcctgacagggcaaaaactgccaaaagaaaaaggatccacaagagttcatgccctgaacaatgtcaacaaggcactgcgggttttgcagaacaataatgttgatttagtgaatattggaagtactgacatcgtagatggaaatcataaactgactcttggtttgatttggaatataatcctccactggcaggtcaaaaatgtaatgaaaaatatcatggctggattgcaacaaaccaacagtgaaaagattctcctgagctgggtccgacaatcaactcgtaattatccacaggttaatgtaatcaacttcaccaccagctggtctgatggcctggctttgaatgctctcatccatagtcataggccagacctatttgactggaatagtgtggtttgccagcagtcagccacacaacgactggaacatgcattcaacatcgccagatatcaattaggcatagagaaactactcgatcctgaagatgttgataccacctatccagataagaagtccatcttaatgtacatcacatcactcttccaagttttgcctcaacaagtgagcattgaagccatccaggaagtggaaatgttgccaaggccacctaaagtgactaaagaagaacattttcagttacatcatcaaatgcactattctcaacagatcacggtcagtctagcacagggatatgagagaacttcttcccctaagcctcgattcaagagctatgcctacacacaggctgcttatgtcaccacctctgaccctacacggagcccatttccttcacagcatttggaagctcctgaagacaagtcatttggcagttcattgatggagagtgaagtaaacctggaccgttatcaaacagctttagaagaagtattatcgtggcttctttctgctgaggacacattgcaagcacaaggagagatttctaatgatgtggaagtggtgaaagaccagtttcatactcatgaggggtacatgatggatttgacagcccatcagggccgggttggtaatattctacaattgggaagtaagctgattggaacaggaaaattatcagaagatgaagaaactgaagtacaagagcagatgaatctcctaaattcaagatgggaatgcctcagggtagctagcatggaaaaacaaagcaatttacatagagttttaatggatctccagaatcagaaactgaaagagttgaatgactggctaacaaaaacagaagaaagaacaaggaaaatggaggaagagcctcttggacctgatcttgaagacctaaaacgccaagtacaacaacataaggtgcttcaagaagatctagaacaagaacaagtcagggtcaattctctcactcacatggtggtggtagttgatgaatctagtggagatcacgcaactgctgctttggaagaacaacttaaggtattgggagatcgatgggcaaacatctgtagatggacagaagaccgctgggttcttttacaagacatccttctcaaatggcaacgtcttactgaagaacagtgcctttttagtgcatggctttcagaaaaagaagatgcagtgaacaagattcacacaactggctttaaagatcaaaatgaaatgttatcaagtcttcaaaaactggccgttttaaaagcggatctagaaaagaaaaagcaatccatgggcaaactgtattcactcaaacaagatcttctttcaacactgaagaataagtcagtgacccagaagacggaagcatggctggataactttgcccggtgttgggataatttagtccaaaaacttgaaaagagtacagcacagatttcacaggctgtcaccaccactcagccatcactaacacagacaactgtaatggaaacagtaactacggtgaccacaagggaacagatcctggtaaagcatgctcaagaggaacttccaccaccacctccccaaaagaagaggcagattactgtggattctgaaattaggaaaaggttggatgttgatataactgaacttcacagctggattactcgctcagaagctgtgttgcagagtcctgaatttgcaatctttcggaaggaaggcaacttctcagacttaaaagaaaaagtcaatgccatagagcgagaaaaagctgagaagttcagaaaactgcaagatgccagcagatcagctcaggccctggtggaacagatggtgaatgagggtgttaatgcagatagcatcaaacaagcctcagaacaactgaacagccggtggatcgaattctgccagttgctaagtgagagacttaactggctggagtatcagaacaacatcatcgctttctataatcagctacaacaattggagcagatgacaactactgctgaaaactggttgaaaatccaacccaccaccccatcagagccaacagcaattaaaagtcagttaaaaatttgtaaggatgaagtcaaccggctatcaggtcttcaacctcaaattgaacgattaaaaattcaaagcatagccctgaaagagaaaggacaaggacccatgttcctggatgcagactttgtggcctttacaaatcattttaagcaagtcttttctgatgtgcaggccagagagaaagagctacagacaatttttgacactttgccaccaatgcgctatcaggagaccatgagtgccatcaggacatgggtccagcagtcagaaaccaaactctccatacctcaacttagtgtcaccgactatgaaatcatggagcagagactcggggaattgcaggctttacaaagttctctgcaagagcaacaaagtggcctatactatctcagcaccactgtgaaagagatgtcgaagaaagcgccctctgaaattagccggaaatatcaatcagaatttgaagaaattgagggacgctggaagaagctctcctcccagctggttgagcattgtcaaaagctagaggagcaaatgaataaactccgaaaaattcagaatcacatacaaaccctgaagaaatggatggctgaagttgatgtttttctgaaggaggaatggcctgcccttggggattcagaaattctaaaaaagcagctgaaacagtgcagacttttagtcagtgatattcagacaattcagcccagtctaaacagtgtcaatgaaggtgggcagaagataaagaatgaagcagagccagagtttgcttcgagacttgagacagaactcaaagaacttaacactcagtgggatcacatgtgccaacaggtctatgccagaaaggaggccttgaagggaggtttggagaaaactgtaagcctccagaaagatctatcagagatgcacgaatggatgacacaagctgaagaagagtatcttgagagagattttgaatataaaactccagatgaattacagaaagcagttgaagagatgaagagagctaaagaagaggcccaacaaaaagaagcgaaagtgaaactccttactgagtctgtaaatagtgtcatagctcaagctccacctgtagcacaagaggccttaaaaaaggaacttgaaactctaaccaccaactaccagtggctctgcactaggctgaatgggaaatgcaagactttggaagaagtttgggcatgttggcatgagttattgtcatacttggagaaagcaaacaagtggctaaatgaagtagaatttaaacttaaaaccactgaaaacattcctggcggagctgaggaaatctctgaggtgctagattcacttgaaaatttgatgcgacattcagaggataacccaaatcagattcgcatattggcacagaccctaacagatggcggagtcatggatgagctaatcaatgaggaacttgagacatttaattctcgttggagggaactacatgaagaggctgtaaggaggcaaaagttgcttgaacagagcatccagtctgcccaggagactgaaaaatccttacacttaatccaggagtccctcacattcattgacaagcagttggcagcttatattgcagacaaggtggacgcagctcaaatgcctcaggaagcccagaaaatccaatctgatttgacaagtcatgagatcagtttagaagaaatgaagaaacataatcaggggaaggaggctgcccaaagagtcctgtctcagattgatgttgcacagaaaaaattacaagatgtctccatgaagtttcgattattccagaaaccagccaattttgagcagcgtctacaagaaagtaagatgattttagatgaagtgaagatgcacttgcctgcattggaaacaaagagtgtggaacaggaagtagtacagtcacagctaaatcattgtgtgaacttgtataaaagtctgagtgaagtgaagtctgaagtggaaatggtgataaagactggacgtcagattgtacagaaaaagcagacggaaaatcccaaagaacttgatgaaagagtaacagctttgaaattgcattataatgagctgggagcaaaggtaacagaaagaaagcaacagttggagaaatgcttgaaattgtcccgtaagatgcgaaaggaaatgaatgtcttgacagaatggctggcagctacagatatggaattgacaaagagatcagcagttgaaggaatgcctagtaatttggattctgaagttgcctggggaaaggctactcaaaaagagattgagaaacagaaggtgcacctgaagagtatcacagaggtaggagaggccttgaaaacagttttgggcaagaaggagacgttggtggaagataaactcagtcttctgaatagtaactggatagctgtcacctcccgagcagaagagtggttaaatcttttgttggaataccagaaacacatggaaacttttgaccagaatgtggaccacatcacaaagtggatcattcaggctgacacacttttggatgaatcagagaaaaagaaaccccagcaaaaagaagacgtgcttaagcgtttaaaggcagaactgaatgacatacgcccaaaggtggactctacacgtgaccaagcagcaaacttgatggcaaaccgcggtgaccactgcaggaaattagtagagccccaaatctcagagctcaaccatcgatttgcagccatttcacacagaattaagactggaaaggcctccattcctttgaaggaattggagcagtttaactcagatatacaaaaattgcttgaaccactggaggctgaaattcagcagggggtgaatctgaaagaggaagacttcaataaagatatgaatgaagacaatgagggtactgtaaaagaattgttgcaaagaggagacaacttacaacaaagaatcacagatgagagaaagcgagaggaaataaagataaaacagcagctgttacagacaaaacataatgctctcaaggatttgaggtctcaaagaagaaaaaaggctctagaaatttctcatcagtggtatcagtacaagaggcaggctgatgatctcctgaaatgcttggatgacattgaaaaaaaattagccagcctacctgagcccagagatgaaaggaaaataaaggaaattgatcgggaattgcagaagaagaaagaggagctgaatgcagtgcgtaggcaagctgagggcttgtctgaggatggggccgcaatggcagtggagccaactcagatccagctcagcaagcgctggcgggaaattgagagcaaatttgctcagtttcgaagactcaactttgcacaaattcacactgtccgtgaagaaacgatgatggtgatgactgaagacatgcctttggaaatttcttatgtgccttctacttatttgactgaaatcactcatgtctcacaagccctattagaagtggaacaacttctcaatgctcctgacctctgtgctaaggactttgaagatctctttaagcaagaggagtctctgaagaatataaaagatagtctacaacaaagctcaggtcggattgacattattcatagcaagaagacagcagcattgcaaagtgcaacgcctgtggaaagggtgaagctacaggaagctctctcccagcttgatttccaatgggaaaaagttaacaaaatgtacaaggaccgacaagggcgatttgacagatctgttgagaaatggcggcgttttcattatgatataaagatatttaatcagtggctaacagaagctgaacagtttctcagaaagacacaaattcctgagaattgggaacatgctaaatacaaatggtatcttaaggaactccaggatggcattgggcagcggcaaactgttgtcagaacattgaatgcaactggggaagaaataattcagcaatcctcaaaaacagatgccagtattctacaggaaaaattgggaagcctgaatctgcggtggcaggaggtctgcaaacagctgtcagacagaaaaaagaggctagaagaacaaaagaatatcttgtcagaatttcaaagagatttaaatgaatttgttttatggttggaggaagcagataacattgctagtatcccacttgaacctggaaaagagcagcaactaaaagaaaagcttgagcaagtcaagttactggtggaagagttgcccctgcgccagggaattctcaaacaattaaatgaaactggaggacccgtgcttgtaagtgctcccataagcccagaagagcaagataaacttgaaaataagctcaagcagacaaatctccagtggataaaggtttccagagctttacctgagaaacaaggagaaattgaagctcaaataaaagaccttgggcagcttgaaaaaaagcttgaagaccttgaagagcagttaaatcatctgctgctgtggttatctcctattaggaatcagttggaaatttataaccaaccaaaccaagaaggaccatttgacgttcaggaaactgaaatagcagttcaagctaaacaaccggatgtggaagagattttgtctaaagggcagcatttgtacaaggaaaaaccagccactcagccagtgaagaggaagttagaagatctgagctctgagtggaaggcggtaaaccgtttacttcaagagctgagggcaaagcagcctgacctagctcctggactgaccactattggagcctctcctactcagactgttactctggtgacacaacctgtggttactaaggaaactgccatctccaaactagaaatgccatcttccttgatgttggaggtacctgctctggcagatttcaaccgggcttggacagaacttaccgactggctttctctgcttgatcaagttataaaatcacagagggtgatggtgggtgaccttgaggatatcaacgagatgatcatcaagcagaaggcaacaatgcaggatttggaacagaggcgtccccagttggaagaactcattaccgctgcccaaaatttgaaaaacaagaccagcaatcaagaggctagaacaatcattacggatcgaattgaaagaattcagaatcagtgggatgaagtacaagaacaccttcagaaccggaggcaacagttgaatgaaatgttaaaggattcaacacaatggctggaagctaaggaagaagctgagcaggtcttaggacaggccagagccaagcttgagtcatggaaggagggtccctatacagtagatgcaatccaaaagaaaatcacagaaaccaagcagttggccaaagacctccgccagtggcagacaaatgtagatgtggcaaatgacttggccctgaaacttctccgggattattctgcagatgataccagaaaagtccacatgataacagagaatatcaatgcctcttggagaagcattcataaaagggtgagtgagcgagaggctgctttggaagaaactcatagattactgcaacagttccccctggacctggaaaagtttcttgcctggcttacagaagctgaaacaactgccaatgtcctacaggatgctacccgtaaggaaaggctcctagaagactccaagggagtaaaagagctgatgaaacaatggcaagacctccaaggtgaaattgaagctcacacagatgtttatcacaacctggatgaaaacagccaaaaaatcctgagatccctggaaggttccgatgatgcagtcctgttacaaagacgtttggataacatgaacttcaagtggagtgaacttcggaaaaagtctctcaacattaggtcccatttggaagccagttctgaccagtggaagcgtctgcacctttctctgcaggaacttctggtgtggctacagctgaaagatgatgaattaagccggcaggcacctattggaggcgactttccagcagttcagaagcagaacgatgtacatagggccttcaagagggaattgaaaactaaagaacctgtaatcatgagtactcttgagactgtacgaatatttctgacagagcagcctttggaaggactagagaaactctaccaggagcccagagagctgcctcctgaggagagagcccagaatgtcactcggcttctacgaaagcaggctgaggaggtcaatactgagtgggaaaaattgaacctgcactccgctgactggcagagaaaaatagatgagacccttgaaagactccaggaacttcaagaggccacggatgagctggacctcaagctgcgccaagctgaggtgatcaagggatcctggcagcccgtgggcgatctcctcattgactctctccaagatcacctcgagaaagtcaaggcacttcgaggagaaattgcgcctctgaaagagaacgtgagccacgtcaatgaccttgctcgccagcttaccactttgggcattcagctctcaccgtataacctcagcactctggaagacctgaacaccagatggaagcttctgcaggtggccgtcgaggaccgagtcaggcagctgcatgaagcccacagggactttggtccagcatctcagcactttctttccacgtctgtccagggtccctgggagagagccatctcgccaaacaaagtgccctactatatcaaccacgagactcaaacaacttgctgggaccatcccaaaatgacagagctctaccagtctttagctgacctgaataatgtcagattctcagcttataggactgccatgaaactccgaagactgcagaaggccctttgcttggatctcttgagcctgtcagctgcatgtgatgccttggaccagcacaacctcaagcaaaatgaccagcccatggatatcctgcagattattaattgtttgaccactatttatgaccgcctggagcaagagcacaacaatttggtcaacgtccctctctgcgtggatatgtgtctgaactggctgctgaatgtttatgatacgggacgaacagggaggatccgtgtcctgtcttttaaaactggcatcatttccctgtgtaaagcacatttggaagacaagtacagataccttttcaagcaagtggcaagttcaacaggattttgtgaccagcgcaggctgggcctccttctgcatgattctatccaaattccaagacagttgggtgaagttgcatcctttgggggcagtaacattgagccaagtgtccggagctgcttccaatttgctaataataagccagagatcgaagcggccctcttcctagactggatgagactggaaccccagtccatggtgtggctgcccgtcctgcacagagtggctgctgcagaaactgccaagcatcaggccaaatgtaacatctgcaaagagtgtccaatcattggattcaggtacaggagtctaaagcactttaattatgacatctgccaaagctgctttttttctggtcgagttgcaaaaggccataaaatgcactatcccatggtggaatattgcactccgactacatcaggagaagatgttcgagactttgccaaggtactaaaaaacaaatttcgaaccaaaaggtattttgcgaagcatccccgaatgggctacctgccagtgcagactgtcttagagggggacaacatggaaactcccgttactctgatcaacttctggccagtagattctgcgcctgcctcgtcccctcagctttcacacgatgatactcattcacgcattgaacattatgctagcaggctagcagaaatggaaaacagcaatggatcttatctaaatgatagcatctctcctaatgagagcatagatgatgaacatttgttaatccagcattactgccaaagtttgaaccaggactcccccctgagccagcctcgtagtcctgcccagatcttgatttccttagagagtgaggaaagaggggagctagagagaatcctagcagatcttgaggaagaaaacaggaatctgcaagcagaatatgaccgtctaaagcagcagcacgaacataaaggcctgtccccactgccgtcccctcctgaaatgatgcccacctctccccagagtccccgggatgctgagctcattgctgaggccaagctactgcgtcaacacaaaggccgcctggaagccaggatgcaaatcctggaagaccacaataaacagctggagtcacagttacacaggctaaggcagctgctggagcaaccccaggcagaggccaaagtgaatggcacaacggtgtcctctccttctacctctctacagaggtccgacagcagtcagcctatgctgctccgagtggttggcagtcaaacttcggactccatgggtgaggaagatcttctcagtcctccccaggacacaagcacagggttagaggaggtgatggagcaactcaacaactccttccctagttcaagaggaagaaatacccctggaaagccaatgagagaggacacaatgtaggaagtcttttccacatggcagatgatttgggcagagcgatggagtccttagtatcagtcatgacagatgaagaaggagcagaataaatgttttacaactcctgattcccgcatggtttttataatattcatacaacaaagaggattagacagtaagagtttacaagaaataaatctatatttttgtgaagggtagtggtattatactgtagatttcagtagtttctaagtctgttattgttttgttaacaatggcaggttttacacgtctatgcaattgtacaaaaaagttataagaaaactacatgtaaaatcttgatagctaaataacttgccatttctttatatggaacgcattttgggttgtttaaaaatttataacagttataaagaaagattgtaaactaaagtgtgctttataaaaaaaagttgtttataaaaacccctaaaaacaaaacaaacacacacacacacacatacacacacacacacaaaactttgaggcagcgcattgttttgcatccttttggcgtgatatccatatgaaattcatggctttttctttttttgcatattaaagataagacttcctctaccaccacaccaaatgactactacacactgctcatttgagaactgtcagctgagtggggcaggcttgagttttcatttcatatatctatatgtctataagtatataaatactatagttatatagataaagagatacgaatttctatagactgactttttccattttttaaatgttcatgtcacatcctaatagaaagaaattacttctagtcagtcatccaggcttacctgcttggtctagaatggatttttcccggagccggaagccaggaggaaactacaccacactaaaacattgtctacagctccagatgtttctcattttaaacaactttccactgacaacgaaagtaaagtaaagtattggatttttttaaagggaacatgtgaatgaatacacaggacttattatatcagagtgagtaatcggttggttggttgattgattgattgattgatacattcagcttcctgctgctagcaatgccacgatttagatttaatgatgcttcagtggaaatcaatcagaaggtattctgaccttgtgaacatcagaaggtattttttaactcccaagcagtagcaggacgatgatagggctggagggctatggattcccagcccatccctgtgaaggagtaggccactctttaagtgaaggattggatgattgttcataatacataaagttctctgtaattacaactaaattattatgccctcttctcacagtcaaaaggaactgggtggtttggtttttgttgcttttttagatttattgtcccatgtgggatgagtttttaaatgccacaagacataatttaaaataaataaactttgggaaaaggtgtaagacagtagccccatcacatttgtgatactgacaggtatcaacccagaagcccatgaactgtgtttccatcctttgcatttctctgcgagtagttccacacaggtttgtaagtaagtaagaaagaaggcaaattgattcaaatgttacaaaaaaacccttcttggtggattagacaggttaaatatataaacaaacaaacaaaaattgctcaaaaaagaggagaaaagctcaagaggaaaagctaaggactggtaggaaaaagctttactctttcatgccattttatttctttttgatttttaaatcattcattcaatagataccaccgtgtgacctataattttgcaaatctgttacctctgacatcaagtgtaattagcttttggagagtgggctgacatcaagtgtaattagcttttggagagtgggttttgtccattattaataattaattaattaacatcaaacacggcttctcatgctatttctacctcactttggttttggggtgttcctgataattgtgcacacctgagttcacagcttcaccacttgtccattgcgttattttctttttcctttataattctttctttttccttcataattttcaaaagaaaacccaaagctctaaggtaacaaattaccaaattacatgaagatttggtttttgtcttgcatttttttcctttatgtgacgctggaccttttctttacccaaggatttttaaaactcagatttaaaacaaggggttactttacatcctactaagaagtttaagtaagtaagtttcattctaaaatcagaggtaaatagagtgcataaataattttgttttaatctttttgtttttcttttagacacattagctctggagtgagtctgtcataatatttgaacaaaaattgagagctttattgctgcattttaagcataattaatttggacattatttcgtgttgtgttctttataaccaccgagtattaaactgtaaatcataatgtaactgaagcataaacatcacatggcatgttttgtcattgttttcaggtactgagttcttacttgagtatcataatatattgtgttttaacaccaacactgtaacatttacgaattatttttttaaacttcagttttactgcattttcacaacatatcagacttcaccaaatatatgccttactattgtattatagtactgctttactgtgtatctcaataaagcacgcagttatgttac

SEQ ID NO: 64 - DNA, 2223 bp, Homo sapiens
  ref <308>: DATABASE ACCESSION NUMBER: NM_000114
cgggtagcgcgctctgaaagtttatgaccgccgcagccaactcctggccggagctggagacgcagcgagcgatcggccggcctcgaacccccacagctggagggcgaggccagctgtacccggccccagtgccctttcgcggccacaagcggccgtcctcctggtccggtgctccggcgcctgatctaggttcatggagccggggctgtggctccttttcgggctcacagtgacctccgccgcaggattcgtgccttgctcccagtctggggatgctggcaggcgcggcgtgtcccaggcccccactgcagccagatctgagggggactgtgaagagactgtggctggccctggcgaggagactgtggctggccctggcgaggggactgtggccccgacagcactgcagggtccaagccctggaagccctgggcaggagcaggcggccgagggggcccctgagcaccaccgatccaggcgctgcacgtgcttcacctacaaggacaaggagtgtgtctactattgccacctggacatcatttggatcaacactcccgaacagacggtgccctatggactgtccaactacagaggaagcttccggggcaagaggtctgcggggccacttccagggaatctgcagctctcacatcggccacacttgcgctgcgcttgtgtggggagatatgacaaggcctgcctgcacttttgcacccaaactctggacgtcagcagtaattcaaggacggcagaaaaaacagacaaagaagaggaagggaaggttgaagtcaaggaccaacaaagcaagcaggctttagacctccaccatccaaagctcatgcccggcagtggactcgccctcgctccatctacctgcccccgctgcctctttcaggaaggagccccttaggaggacaggcctgcagctccaatttcatgcaggaaattggttttggagagttttggcaagttggaaagccacttactggcttttgacatgacttctcttggagaataagtggactccaagctaactctttgcaaatgtaaacacatgtccatcttgttaataaatgcaaaatgcccgtgcagcagaagcatgcgactttcatatccttgcctagaataggctgcatggtgtatgtcagtgagggccacgaggcgtcggctttagacacagatcatagctctacaggagtttatgaatttgaagcttatgggattttggcagagaaattttcagctgtgcttgatacccaccaaaagaatgtatctcgaaagaatgaaggaagaagaaaaaaggatccttgatgtttgtgacaagaaaatgagaaagttagtatctgcaatacagagcttgttcctgttcagtgactgaccctctgtattctgtatagacaccaggccgatacacagtggagttcccaggccttgtttgcaggaagccgactgtaaagacagccccagctcaaggctattaggttgaatatttgctttcatgagtaaatgtggatctttggggaatggcttcaaaataagtcacgaacacaaattctttgtaaattatgtaaattcctgtttatataaattggcaacaacttataccgtctgacagttcaaaatctctttcagctgcgctcttcccaccgagccgagcttactgtgagtgtggagatgttatcccaccatgtaaagtcgcctgcgcaggggagggctgcccatctccccaacccagtcacagagagataggaaacggcatttgagtgggtgtccagggccccgtagagagacatttaagatggtgtatgacagagcattggccttgaccaaatgttaaatcctctgtgtgtatttcataagttattacaggtataaaagtgatgacctatcatgaggaaatgaaagtggctgatttgctggtaggattttgtacagtttagagaagcgattatttattgtgaaactgttctccactccaactcctttatgtggatctgttcaaagtagtcactgtatatacgtatagagaggtagataggtaggtagattttaaattgcattctgaatacaaactcatactccttagagcttgaattacatttttaaaatgcatatgtgctgtttggcaccgtggcaagatggtatcagagagaaacccatcaattgctcaaatactcagaaagtactgtcaaaagcctaataaaaaacctaaagtttgctctg

SEQ ID NO: 65 - DNA, 2035 bp, Homo sapiens
  ref <308>: DATABASE ACCESSION NUMBER: NM_000147
gaattccgggctccggggatgaggtcgcggccggcgggtcccgcgctgttgctgctgctgctcttcctcggagcggccgagtcggtgcgtcgggcccagcctccgcgccgctacaccccagactggccgagcctggattctcggccgctgccggcctggttcgacgaagccaagttcggggtgttcatccactggggcgtgttctcggtgcccgcctggggcagcgagtggttctggtggcactggcagggcgaggggcggccgcagtaccagcgcttcatgcgcgacaactacccgcccggcttcagctacgccgacttcggaccgcagttcactgcgcgcttcttccacccggaggagtgggccgacctcttccaggccgcgggcgccaagtatgtagttttgacgacaaagcatcacgaaggcttcacaaactggccgagtcctgtgtcttggaactggaactccaaagacgtggggcctcatcgggatttggttggtgaattgggaacagctctccggaagaggaacatccgctatggactataccactcactcttagagtggttccatccactctatctacttgataagaaaaatggcttcaaaacacagcattttgtcagtgcaaaaacaatgccagagctgtacgaccttgttaacagctataaacctgatctgatctggtctgatggggagtgggaatgtcctgatacttactggaactccacaaattttctttcatggctctacaatgacagccctgtcaaggatgaggtggtagtaaatgaccgatggggtcagaactcttcctgtcaccatggaggatactataactgtgaagataaattcaagccacagagcttgccagatcacaagtgggagatgtgcaccagcattgacaagttttcctggggctatcgtcgtgacatggcattgtctgatgttacagaagaatctgaaatcatttcggaactggttcagacagtaagtttgggaggcaactatcttctgaacattggaccaactaaagatggactgattgttcccatcttccaagaaaggcttcttgctgttgggaaatggctgagcatcaatggggaggctatctatgcctccaaaccatggcgggtgcaatgggaaaagaacacaacatctgtatggtatacctcaaagggatcggctgtttatgccatttttctgcactggccagaaaatggagtcttaaaccttgaatcccccataactacctcaactacaaagataacaatgctgggaattcaaggagatctgaagtggtccacagatccagataaaggtctcttcatctctctaccccagttgccaccctctgctgtccccgcagagtttgcttggactataaagctgacaggagtgaagtaatcatttgagtgcaagaagaaagaggcgctgctcactgttttcctgcttcagtttttctcttatagtaccatcactataatcaacgaacttctcttctccacccagagatggcttttccaacacattttaattaaaggaactgagtacattaccctgatgtctaaatggaccaaagatctgagatccattgtgattatatctgtatcaggtcagcagaagaaggaactgagcagttgaactctgagttcatcaattctaatatttggaaattatctacaatggaatcttccctctgttctctgataacctacttgcttactcaatgcctttaagccaagtcaccctgttgcctatgggaggaggtggaaggatttggcaagctcaaccacatgctatttagttagcatcagttgtcaccaacagtctttctgcaaagggcaggagagctttgggggaaaggaaaaggcttaccaggctgctatggtcaactcttcagaaattttcagagcaatctaaaagcgccaaaattcgctatgtttacagtgatactattaagaaaatgaatgtgattctgctctgtctttttaagtatgatcaaataaaaaatttgtacatcacaatcatttctacc

SEQ ID NO: 66 - DNA, 3127 bp, Homo sapiens
  ref <308>: DATABASE ACCESSION NUMBER: NM_000150
gtttgcatagctccctggacttctgctttgcactgccctgcaggagtgggtggggaaaggaagtggctttgaggcacacagaggggcttgttgaggccaccggaggaagcttctgccaccaatatgggacctgtgcccagcctaccagaagagagcatctgaaaacatgtatcgacatggtaacccctctgcttgaagcctcacatggctccctattgccttggtgctgaacaccctatggctgaccgtggcccagcctctgcaacagctctgcctcctctccagtggtgaagacccagcctgctgagactcctcctgcagttcctcaacatgcctgcatttctgctgccgtcagggcctttgcgaaggttgttccttgtaactggaatgcccttccatccctttttttattcaaaaggctgcaattttaattgaagaaagttcccttccaaggttcatgagttgcctgacttgcccaccggtttcctgcaagatcccttggcctggcacttagtgctcaggaaatatttggtgatgggccaactgagtgagaaggtgggatctggtgggaaggaaaggcggaaggtagaaattctgctcacttcctcattcccacctcccaaggaacccctggtgtccctgtggaacccgctttgggaaccggtggttcaggtcagccttttcactttgtactcaaagccacatcgcattgaagccacaggtggggcaaggtcatgcatgactgagtctccaaatcccttcaccctgtttggttctgcaacggggattaggggagccccacgatttgttttcaaaggatgtccgggctccaggacaggatgccctgggtcacctgatgacaggtgtggtggttggaaagggccgggtttcagctccgggtacacttcctccttccttctgctgcgtggtgtggcctcttccacgtcctcagaatccagctgttactcgtccgcggcctctcagctctagggccctctgcacactggcccccccagtgtcacgggcatccagacgggatccagtgcatcctcttttagaagaaaggcctgtctccaggtccccgagtccctctagcatctcccagaaggtgtcaagacgcagcagtgtccaggagcggcagagactctgacccatggatcccctgggcccggccaagccacagtggtcgtggcgctgctgtctgaccacgctgctgtttcagctgctgatggctgtgtgtttcttctcctatctgcgtgtgtctcaagacgatcccactgtgtaccctaatgggtcccgcttcccagacagcacagggacccccgcccactccatccccctgatcctgctgtggacgtggccttttaacaaacccatagctctgccccgctgctcagagatggtgcctggcacggctgactgcaacatcactgccgaccgcaaggtgtatccacaggcagacgcggtcatcgtgcaccaccgagaggtcatgtacaaccccagtgcccagctcccacgctccccgaggcggcaggggcagcgatggatctggttcagcatggagtccccaagccactgctggcagctgaaagccatggacggatacttcaatctcaccatgtcctaccgcagcgactccgacatcttcacgccctacggctggctggagccgtggtccggccagcctgcccacccaccgctcaacctctcggccaagaccgagctggtggcctgggcagtgtccaactgggggccaaactccgccagggtgcgctactaccagagcctgcaggcccatctcaaggtggacgtgtacggacgctcccacaagcccctgccccagggaaccatgatggagacgctgtcccggtacaagttctatctggccttcgagaactccttgcaccccgactacatcaccgagaagctgtggaggaacgccctggaggcctgggccgtgcccgtggtgctgggccccagcagaagcaactacgagaggttcctgccacccgacgccttcatccacgtggacgacttccagagccccaaggacctggcccggtacctgcaggagctggacaaggaccacgcccgctacctgagctactttcgctggcgggagacgctgcggcctcgctccttcagctgggcactcgctttctgcaaggcctgctggaaactgcaggaggaatccaggtaccagacacgcggcatagcggcttggttcacctgagaggctggtgtggggcctgggctgccaggaacctcattttcctggggcctcacctgagtgggggcctcatctacctaaggactcgtttgcctgaagcttcacctgcctgaggactcacctgcctgggacggtcacctgttgcagcttcacctgcctggggattcacctacctgggtcctcactttcctggggcctcacctgctggagtcttcggtggccaggtatgtcccttacctgggatttcacatgctggcttccaggagcgtcccctgcggaagcctggcctgctggggatgtctcctggggactttgcctactggggacctcggctgttggggactttacctgctgggacctgctcccagagaccttccacactgaatctcacctgctaggagcctcacctgctggggacctcaccctggaggcactgggccctgggaactggcacccatgggcccacccatgagtgatggttctggctgatttgtttgtgatgttgttagccgcctgtgaggggtgcagagagataatcaccgcaccgtttccagatgtaatactgcaaagaaaaccaatgatgaggccgggtgcggtggctcacacctgtaatcccagcactttgggaggccgaggcaggcggatcacaaggtcaggagatcgagaccatcctggccaatatggtgaaacccgtctctattaaaaaatacaaaaattagtggggcgtggtctcaggctcctgcagtcccagctacttgggaggctgaggcaggagaatggtgtgaacctgtgaggtggagcttgcagtgagccaagatcgcgccattgcactccaacctggacgacagagcaagactccatctcaaaaaaataaaataaaggccatatgtttaatca

SEQ ID NO: 67 - DNA, 2338 bp, Homo sapiens
  ref <308>: DATABASE ACCESSION NUMBER: NM_000291
agcgcacgtcggcagtcggctccctcgttgaccgaatcaccgacctctctccccagctgtatttccaaaatgtcgctttctaacaagctgacgctggacaagctggacgttaaagggaagcgggtcgttatgagagtcgacttcaatgttcctatgaagaacaaccagataacaaacaaccagaggattaaggctgctgtcccaagcatcaaattctgcttggacaatggagccaagtcggtagtccttatgagccacctaggccggcctgatggtgtgcccatgcctgacaagtactccttagagccagttgctgtagaactcaaatctctgctgggcaaggatgttctgttcttgaaggactgtgtaggcccagaagtggagaaagcctgtgccaacccagctgctgggtctgtcatcctgctggagaacctccgctttcatgtggaggaagaagggaagggaaaagatgcttctgggaacaaggttaaagccgagccagccaaaatagaagctttccgagcttcactttccaagctaggggatgtctatgtcaatgatgcttttggcactgctcacagagcccacagctccatggtaggagtcaatctgccacagaaggctggtgggtttttgatgaagaaggagctgaactactttgcaaaggccttggagagcccagagcgacccttcctggccatcctgggcggagctaaagttgcagacaagatccagctcatcaataatatgctggacaaagtcaatgagatgattattggtggtggaatggcttttaccttccttaaggtgctcaacaacatggagattggcacttctctgtttgatgaagagggagccaagattgtcaaagacctaatgtccaaagctgagaagaatggtgtgaagattaccttgcctgttgactttgtcactgctgacaagtttgatgagaatgccaagactggccaagccactgtggcttctggcatacctgctggctggatgggcttggactgtggtcctgaaagcagcaagaagtatgctgaggctgtcactcgggctaagcagattgtgtggaatggtcctgtgggggtatttgaatgggaagcttttgcccggggaaccaaagctctcatggatgaggtggtgaaagccacttctaggggctgcatcaccatcataggtggtggagacactgccacttgctgtgccaaatggaacacggaggataaagtcagccatgtgagcactgggggtggtgccagtttggagctcctggaaggtaaagtccttcctggggtggatgctctcagcaatatttagtactttcctgccttttagttcctgtgcacagcccctaagtcaacttagcattttctgcatctccacttggcattagctaaaaccttccatgtcaagattcagctagtggccaagagatgcagtgccaggaacccttaaacagttgcacagcatctcagctcatcttcactgcaccctggatttgcatacattcttcaagatcccatttgaattttttagtgactaaaccattgtgcattctagagtgcatatatttatattttgcctgttaaaaagaaagtgagcagtgttagcttagttctcttttgatgtaggttattatgattagctttgtcactgtttcactactcagcatggaaacaagatgaaattccatttgtaggtagtgagacaaaattgatgatccattaagtaaacaataaaagtgtccattgaaaccgtgatttttttttttttcctgtcatactttgttaggaagggtgagaatagaatcttgaggaacggatcagatgtctatattgctgaatgcaagaagtggggcagcagcagtggagagatgggacaattagataaatgtccattctttatcaagggcctactttatggcagacattgtgctagtgcttttattctaacttttatttttatcagttacacatgatcataatttaaaaagtcaaggcttataacaaaaaagccccagcccattcctcccattcaagattcccactccccagaggtgaccactttcaactcttgagtttttcaggtatatacctccatgtttctaagtaatatgcttatattgttcacttcctttttttttattttttaaagaaatctatttcataccatggaggaaggctctgttccacatatatttccacttcttcattctctcggtatagttttgtcacaattatagattagatcaaaagtctacataactaatacagctgagctatgtagtatgctatgattaaatttacttatgtaaaaaaaaaaaaaaaaaaaa

SEQ ID NO: 68 - DNA, 722 bp, Homo sapiens
  ref <308>: DATABASE ACCESSION NUMBER: NM_000331
aaggctcagtataaatagcagccaccgctccctggcaggcagggacccgcagctcagctacagcacagatcaggtgaggagcacaccaaggagtgatttttaaaacttactctgttttctctttcccaacaagattatcatttcctttaaaaaaaatagttatcctggggcatacagccataccattctgaaggtgtcttatctcctctgatctagagagcaccatgaagcttctcacgggcctggttttctgctccttggtcctgggtgtcagcagccgaagcttcttttcgttccttggcgaggcttttgatggggctcgggacatgtggagagcctactctgacatgagagaagccaattacatcggctcagacaaatacttccatgctcgggggaactatgatgctgccaaaaggggacctgggggtgcctgggctgcagaagtgatcagcgatgccagagagaatatccagagattctttggccatggtgcggaggactcgctggctgatcaggctgccaatgaatggggcaggagtggcaaagaccccaatcacttccgacctgctggcctgcctgagaaatactgagcttcctcttcactctgctctcaggagatctggctgtgaggccctcagggcagggatacaaagcggggagagggtacacaatgggtatctaataaatacttaagaggtggaaaaaaaaaaaaaaaaaaa

SEQ ID NO: 69 - DNA, 3890 bp, Homo sapiens
  ref <308>: DATABASE ACCESSION NUMBER: NM_000587
atgaaggtgataagcttattcattttggtgggatttataggagagttccaaagtttttcaagtgcctcctctccagtcaactgccagtgggacttctatgccccttggtcagaatgcaatggctgtaccaagactcagactcgcaggcggtcagttgctgtgtatgggcagtatggaggccagccttgtgttggaaatgcttttgaaacacagtcctgtgaacctacaagaggatgtccaacagaggagggatgtggagagcgtttcaggtgcttttcaggtcagtgcatcagcaaatcattggtttgcaatggggattctgactgtgatgaagacagtgctgatgaagacagatgtgaggactcagaaaggagaccttcctgtgatatcgataaacctcctcctaacatagaacttactggaaatggttacaatgaactcactggccagtttaggaacagagtcatcaataccaaaagttttggtggtcaatgtagaaaggtgtttagtggggatggaaaagatttctacaggctgagtggaaatgtcctgtcctatacattccaggtgaaaataaataatgattttaattatgaattttacaatagtacttggtcttatgtaaaacatacgtcgacagaacacacatcatctagtcggaagcgctccttttttagatcttcatcatcttcttcacgcagttatacttcacataccaatgaaatccataaaggaaagagttaccaactgctggttgttgagaacactgttgaagtggctcagttcattaataacaatccagaatttttacaacttgctgagccattctggaaggagctttcccacctcccctctctgtatgactacagtgcctaccgaagattaatcgaccagtacgggacacattatctgcaatctgggtcgttaggaggagaatacagagttctattttatgtggactcagaaaaattaaaacaaaatgattttaattcagtcgaagaaaagaaatgtaaatcctcaggttggcattttgtcgttaaattttcaagtcatggatgcaaggaactggaaaacgctttaaaagctgcttcaggaacccagaacaatgtattgcgaggagaaccgttcatcagagggggaggtgcaggcttcatatctggccttagttacctagagctggacaatcctgctggaaacaaaaggcgatattctgcctgggcagaatctgtgactaatcttcctcaagtcataaaacaaaagctgacacctttatatgagctggtaaaggaagtaccttgtgcctctgtgaaaaaactatacctgaaatgggctcttgaagagtatctggatgaatttgacccctgtcattgccggccttgtcaaaatggtggtttggctactgttgaggggacccattgtctgtgccattgcaaaccgtacacatttggtgcggcgtgtgagcaaggagtcctcgtagggaatcaagcaggaggggttgatggaggttggagttgctggtcctcttggagcccctgtgtccaagggaagaaaacaagaagccgtgaatgcaataacccacctcccagtgggggtgggagatcctgcgttggagaaacgacagaaagcacacaatgcgaagatgaggagctggagcacttgaggttgcttgaaccacattgctttcctttgtctttggttccaacagaattctgtccatcacctcctgccttgaaagatggatttgttcaagatgaaggtccaatgtttcctgtggggaaaaatgtagtgtacacttgcaatgaaggatactctcttattggaaacccagtggccagatgtggagaagatttacggtggcttgttggggaaatgcattgtcagaaaattgcctgtgttctacctgtactgatggatggcatacagagtcacccccaaaaacctttctacacagttggtgagaaggtgactgtttcctgttcaggtggcatgtccttagaaggtccttcagcatttctctgtggctccagccttaagtggagtcctgagatgaagaatgcccgctgtgtacaaaaagaaaatccgttaacacaggcagtgcctaaatgtcagcgctgggagaaactgcagaattcaagatgtgtttgtaaaatgccctacgaatgtggaccttccttggatgtatgtgctcaagatgagagaagcaaaaggatactgcctctgacagtttgcaagatgcatgttctccactgtcagggtagaaattacacccttactggtagggacagctgtactctgcctgcctcagctgagaaagcttgtggtgcctgcccactgtggggaaaatgtgatgctgagagcagcaaatgtgtctgccgagaagcatcggagtgcgaggaagaagggtttagcatttgtgtggaagtgaacggcaaggagcagacgatgtctgagtgtgaggcgggcgctctgagatgcagagggcagagcatctctgtcaccagcataaggccttgtgctgcggaaacccagtaggctcctggaggccatggtcagcttgcttggaatccagcaggcagctggggctgagtgaaaacatctgcacaactgggcactggacagcttttccttcttctccagtgtctaccttcctcctcaactcccagccatctgtataaacacaatcctttgttctcccaaatctgaatcgaattactcttttgcctcctttttaatgtcagtaaggatatgagcctttgcacaggctggctgcgtgttcttgaaataggtgttaccttctctgggccttggttttttaaaatctgtaaaattagaggattgcactagagaaacttgaatgctccattcaggcctatcattttattaagtatgattgacacagcccatgggccagaacacactctacaaaatgactaggataacagaaagaacgtgatctcctgattagagagggtggttttcctcaatggaaccaaatataaagaggacttgaacaaaaatgacagatacaaactatttctatcctgagtagtaatctcacacttcatcctatagagtcaaccaccacagataggaattccttattctttttttaatttttttaagacagagtctcactttgttgcccaggctggagcgcagtggggtgatctcatctccctgcaacctccgcctcctgggttgaagcgattcttgtgcctcagcttcccaagcagctgggattacaggtgcccgccaccacgcccagctaatttttgcatttttagtagagatgggtttcaccatgttggccatgctcgtctccaactcctgacctcaggtaatccgtctgccttggcctcccaaatgctgggattacagacatgaaccaccacgcctggctggaatacttactcttgtcgggagattgaaccactaaaatgttagagcagaattcattatgctgtggtcacaggggtgtcttgtctgagaacaaatacaattcagtcttctctttggggttttagtatgtgtcaaacataggactggaagtttgcccctgttcttttttcttttgaaagaacatcagttcatgcctgaggcatgagtgactgtgcatttgagatagttttccctattctgtggatacagtcccagagttttcagggagtacacaggtagattagtttgaagcattgaccttttatttattccttatttctctttcatcaaaacaaaacagcagctgtgggaggagaaatgagagggcttaaatgaaatttaaaataagctatattatacaaatactatctctgtattgttctgaccctggtaaatatatttcaaaacttcagatgacaaggattagaacactcattaagatgctattcttc

SEQ ID NO: 70 - DNA, 3442 bp, Homo sapiens
  ref <308>: DATABASE ACCESSION NUMBER: NM_000693
agccggtgcgccgcagactagggcgcctcgggccagggagcgcggaggagccatggccaccgctaacggggccgtggaaaacgggcagccggacgggaagccgccggccctgccgcgccccatccgcaacctggaggtcaagttcaccaagatatttatcaacaatgaatggcacgaatccaagagtgggaaaaagtttgctacatgtaacccttcaactcgggagcaaatatgtgaagtggaagaaggagataagcccgacgtggacaaggctgtggaggctgcacaggttgccttccagaggggctcgccatggcgccggctggatgccctgagtcgtgggcggctgctgcaccagctggctgacctggtggagagggaccgcgccaccttggccgccctggagacgatggatacagggaagccatttcttcatgcttttttcatcgacctggagggctgtattagaaccctcagatactttgcagggtgggcagacaaaatccagggcaagaccatccccacagatgacaacgtcgtatgcttcaccaggcatgagcccattggtgtctgtggggccatcactccatggaacttccccctgctgatgctggtgtggaagctggcacccgccctctgctgtgggaacaccatggtcctgaagcctgcggagcagacacctctcaccgccctttatctcggctctctgatcaaagaggccgggttccctccaggagtggtgaacattgtgccaggattcgggcccacagtgggagcagcaatttcttctcaccctcagatcaacaagatcgccttcaccggctccacagaggttggaaaactggttaaagaagctgcgtcccggagcaatctgaagcgggtgacgctggagctgggggggaagaacccctgcatcgtgtgtgcggacgctgacttggacttggcagtggagtgtgcccatcagggagtgttcttcaaccaaggccagtgttgcacggcagcctccagggtgttcgtggaggagcaggtctactctgagtttgtcaggcggagcgtggagtatgccaagaaacggcccgtgggagaccccttcgatgtcaaaacagaacaggggcctcagattgatcaaaagcagttcgacaaaatcttagagctgatcgagagtgggaagaaggaaggggccaagctggaatgcgggggctcagccatggaagacaaggggctcttcatcaaacccactgtcttctcagaagtcacagacaacatgcggattgccaaagaggagattttcgggccagtgcaaccaatactgaagttcaaaagtatcgaagaagtgataaaaagagcgaatagcaccgactatggactcacagcagccgtgttcacaaaaaatctcgacaaagccctgaagttggcttctgccttagagtctggaacggtctggatcaactgctacaacgccctctatgcacaggctccatttggtggctttaaaatgtcaggaaatggcagagaactaggtgaatacgctttggccgaatacacagaagtgaaaactgtcaccatcaaacttggcgacaagaacccctgaaggaaaggcggggctccttcctcaaacatcggacggcggaatgtggcagatgaaatgtgctggaggaaaaaaatgacatttctgaccttcccgggacacattcttctggaggctttacatctactggagttgaatgattgctgttttcctctcactctcctgtttattcaccagactggggatgcctataggttgtctgtgaaatcgcagtcctgcctggggagggagctgttggccatttctgtgtttccctttaaaccagatcctggagacagtgagatactcagggcgttgttaacagggagtggtatttgaagtgtccagcagttgcttgaaatgctttgccgaatctgactccagtaagaatgtgggaaaaccccctgtgtgttctgcaagcagggctcttgcaccagcggtctcctcagggtggacctgcttacagagcaagccacgcctctttccgaggtgaaggtgggaccattccttgggaaaggattcacagtaaggttttttggtttttgttttttgttttcttgtttttaaaaaaaggatttcacagtgagaaagttttggttagtgcataccgtggaagggcgccagggtctttgtggattgcatgttgacattgaccgtgagattcggcttcaaaccaatactgcctttggaatatgacagaatcaatagcccagagagcttagtcaaagacgatatcacggtctaccttaaccaaggcactttcttaagcagaaaatattgttgaggttacctttgctgctaaagatccaatcttctaacgccacaacagcatagcaaatcctaggataattcacctcctcatttgacaaatcagagctgtaattcactttaacaaattacgcatttctatcacgttcactaacagcttatgataagtctgtgtagtcttccttttctccagttctgttacccaatttagattagtaaagcgtacacaactggaaagactgctgtaataacacagccttgttatttttaagtcctattttgatattaatttctgattagttagtaaataacacctggattctatggaggacctcggtcttcatccaagtggcctgagtatttcactggcaggttgtgaatttttcttttcctctttgggaatccaaatgatgatgtgcaatttcatgttttaacttgggaaactgaaagtgttcccatatagcttcaaaaacaaaaacaaatgtgttatccgacggatacttttatggttactaactagtactttcctaattgggaaagtagtgcttaagtttgcaaattaagttggggagggcaataataaaatgagggcccgtaacagaaccagtgtgtgtataacgaaaaccatgtataaaatgggcctatcacccttgtcagagatataaattaccacatttggcttcccttcatcagctaacacttatcacttatactaccaataacttgttaaatcaggatttggcttcatacactgaattttcagtattttatctcaagtagatatagacactaaccttgatagtgatacgttagagggttcctattcttccattgtacgataatgtctttaatatgaaatgctacattatttataattggtagagttattgtatctttttatagttgtaagtacacagaggtggtatatttaaacttctgtaatatactgtatttagaaatggaaatatatatagtgttaggtttcacttcttttaaggtttacccctgtggtgtggtttaaaaatctataggcctgggaattccgatcctagctgcagatcgcatcccacaatgcgagaatgataaaataaaattggatatttgaga

SEQ ID NO: 71 - DNA, 2393 bp, Homo sapiens
  ref <308>: DATABASE ACCESSION NUMBER: NM_000785
ggggttgagatatgatgctcaggagaagcgctttctttcgcgagcaccctgaaccagaccatgacccagaccctcaagtacgcctccagagtgttccatcgcgtccgctgggcgcccgagttgggcgcctccctaggctaccgagagtaccactcagcacgccggagcttggcagacatcccaggcccctctacgcccagctttctggccgaacttttctgcaagggggggctgtcgaggctacacgagctgcaggtgcagggcgccgcgcacttcgggccggtgtggctagccagctttgggacagtgcgcaccgtgtacgtggctgcccctgcactcgtcgaggagctgctgcgacaggagggaccccggcccgagcgctgcagcttctcgccctggacggagcaccgccgctgccgccagcgggcttgcggactgctcactgcggaaggcgaagaatggcaaaggctccgcagtctcctggccccgctcctcctccggcctcaagcggccgcccgctacgccggaaccctgaacaacgtagtctgcgaccttgtgcggcgtctgaggcgccagcggggacgtggcacggggccgcccgccctggttcgggacgtggcgggggaattttacaagttcggactggaaggcatcgccgcggttctgctcggctcgcgcttgggctgcctggaggctcaagtgccacccgacacggagaccttcatccgcgctgtgggctcggtgtttgtgtccacgctgttgaccatggcgatgccccactggctgcgccaccttgtgcctgggccctggggccgcctctgccgagactgggaccagatgtttgcatttgctcagaggcacgtggagcggcgagaggcagaggcagccatgaggaacggaggacagcccgagaaggacctggagtctggggcgcacctgacccacttcctgttccgggaagagttgcctgcccagtccatcctgggaaatgtgacagagttgctattggcgggagtggacacggtgtccaacacgctctcttgggctctgtatgagctctcccggcaccccgaagtccagacagcactccactcagagatcacagctgccctgagccctggctccagtgcctacccctcagccactgttctgtcccagctgcccctgctgaaggcggtggtcaaggaagtgctaagactgtaccctgtggtacctggaaattctcgtgtcccagacaaagacattcatgtgggtgactatattatccccaaaaatacgctggtcactctgtgtcactatgccacttcaagggaccctgcccagttcccagagccaaattcttttcgtccagctcgctggctgggggagggtcccaccccccacccatttgcatctcttccctttggctttggcaagcgcagctgtatggggagacgcctggcagagcttgaattgcaaatggctttggcccagatcctaacacattttgaggtgcagcctgagccaggtgcggccccagttagacccaagacccggactgtcctggtacctgaaaggagcatcaacctacagtttttggacagatagtcccatggaaagagactgtcatcatcaccctttcattcatcatagggataagattttttgtaggcacaagaccaaggtatacatcttcccctaatgcctatctgaccaaactggatagaaccaccatagtgaagtgtgaggcggccctgaccaatgtgtgaagtatgcacttggcctgactcaggaagccaggtgagaaaaccatggtctctctgcttgcttggcccttctgatcatgtatgcatcccccaaggatgaaatcagattttaactaataatgctggatggcctgaggaaagattcaactgcctctctttttgggctttcatagtgttcattgatgctgctggctaagcatttatcaaagcataagctcagtaactgtgcatctggtctgtacctggttggtccttcgtctttgcatgtaagctctttgagaggaagggtgaagccttatttgttttttatgtcccctgccagggcctgtctctgactaggtgtcaccatacacattcttagattgaatctgaaccatgtggcagaagggataagcagcttacttagtaggctctgtctacccccttccttctttgtcttgcccctaggaaggtgaatctgccctagcctggtttacggtttcttataactctcctttgctctctggccactattaagtgggtttgccccatcacttagttctcaggcagagacatctttgggcctgtccctgcccaggcctctggctttttatattgaaaatttttaaatattcacaaattttagaataaatcaaatattccattctt

SEQ ID NO: 72 - DNA, 2461 bp, Homo sapiens
  ref <308>: DATABASE ACCESSION NUMBER: NM_000820
ccgcagccgccgccgccgccgccgccgcgatgtgaccttcagggccgccaggacgggatgaccggagcctccgccccgcggcgcccgctcgcctcggcctcccgggcgctctgaccgcgcgtccccggcccgccatggccccttcgctctcgcccgggcccgccgccctgcgccgcgcgccgcagctgctgctgctgctgctggccgcggagtgcgcgcttgccgcgctgttgccggcgcgcgaggccacgcagttcctgcggcccaggcagcgccgcgcctttcaggtcttcgaggaggccaagcagggccacctggagagggagtgcgtggaggagctgtgcagccgcgaggaggcgcgggaggtgttcgagaacgaccccgagacggattatttttacccaagatacttagactgcatcaacaagtatgggtctccgtacaccaaaaactcaggcttcgccacctgcgtgcaaaacctgcctgaccagtgcacgcccaacccctgcgataggaaggggacccaagcctgccaggacctcatgggcaacttcttctgcctgtgtaaagctggctgggggggccggctctgcgacaaagatgtcaacgaatgcagccaggagaacgggggctgcctccagatctgccacaacaagccgggtagcttccactgttcctgccacagcggcttcgagctctcctctgatggcaggacctgccaagacatagacgagtgcgcagactcggaggcctgcggggaggcgcgctgcaagaacctgcccggctcctactcctgcctctgtgacgagggctttgcgtacagctcccaggagaaggcttgccgagatgtggacgagtgtctgcagggccgctgtgagcaggtctgcgtgaactccccagggagctacacctgccactgtgacgggcgtgggggcctcaagctgtcccaggacatggacacctgtgaggacatcttgccgtgcgtgcccttcagcgtggccaagagtgtgaagtccttgtacctgggccggatgttcagtgggacccccgtgatccgactgcgcttcaagaggctgcagcccaccaggctggtagctgagtttgacttccggacctttgaccccgagggcatcctcctctttgccggaggccaccaggacagcacctggatcgtgctggccctgagagccggccggctggagctgcagctgcgctacaacggtgtcggccgtgtcaccagcagcggcccggtcatcaaccatggcatgtggcagacaatctctgttgaggagctggcgcggaatctggtcatcaaggtcaacagggatgctgtcatgaaaatcgcggtggccggggacttgttccaaccggagcgaggactgtatcatctgaacctgaccgtgggaggtattcccttccatgagaaggacctcgtgcagcctataaaccctcgtctggatggctgcatgaggagctggaactggctgaacggagaagacaccaccatccaggaaacggtgaaagtgaacacgaggatgcagtgcttctcggtgacggagagaggctctttctaccccgggagcggcttcgccttctacagcctggactacatgcggacccctctggacgtcgggactgaatcaacctgggaagtagaagtcgtggctcacatccgcccagccgcagacacaggcgtgctgtttgcgctctgggcccccgacctccgtgccgtgcctctctctgtggcactggtagactatcactccacgaagaaactcaagaagcagctggtggtcctggccgtggagcatacggccttggccctaatggagatcaaggtctgcgacggccaagagcacgtggtcaccgtctcgctgagggacggtgaggccaccctggaggtggacggcaccaggggccagagcgaggtgagcgccgcgcagctgcaggagaggctggccgtgctcgagaggcacctgcggagccccgtgctcacctttgctggcggcctgccagatgtgccggtgacttcagcgccagtcaccgcgttctaccgcggctgcatgacactggaggtcaaccggaggctgctggacctggacgaggcggcgtacaagcacagcgacatcacggcccactcctgcccccccgtggagcccgccgcagcctaggcccccacgggacgcggcaggcttctcagtctctgtccgagacagccgggaggagcctgggggctcctcaccacgtggggccatgctgagagctgggctttcctctgtgaccatcccggcctgtaacatatctgtaaatagtgagatggacttggggcctctgacgccgcgcactcagccgtgggcccgggcgcggggaggccggcgcagcgcagagcgggctcgaagaaaataattctctattatttttattaccaagcgcttctttctgactctaaaatatggaaaat

SEQ ID NO: 73 - DNA, 9090 bp, Homo sapiens
  ref <308>: DATABASE ACCESSION NUMBER: NM_000876
cgagcccagtcgagccgcgctcacctcgggctcccgctccgtctccacctccgcctttgccctggcggcgcgaccccgtcccggcgcggcccccagcagtcgcgcgccgttagcctcgcgcccgccgcgcagtccgggcccggcgcgatgggggccgccgccggccggagcccccacctggggcccgcgcccgcccgccgcccgcagcgctctctgctcctgctgcagctgctgctgctcgtcgctgccccggggtccacgcaggcccaggccgccccgttccccgagctgtgcagttatacatgggaagctgttgataccaaaaataatgtactttataaaatcaacatctgtggaagtgtggatattgtccagtgcgggccatcaagtgctgtttgtatgcacgacttgaagacacgcacttatcattcagtgggtgactctgttttgagaagtgcaaccagatctctcctggaattcaacacaacagtgagctgtgaccagcaaggcacaaatcacagagtccagagcagcattgccttcctgtgtgggaaaaccctgggaactcctgaatttgtaactgcaacagaatgtgtgcactactttgagtggaggaccactgcagcctgcaagaaagacatatttaaagcaaataaggaggtgccatgctatgtgtttgatgaagagttgaggaagcatgatctcaatcctctgatcaagcttagtggtgcctacttggtggatgactccgatccggacacttctctattcatcaatgtttgtagagacatagacacactacgagacccaggttcacagctgcgggcctgtccccccggcactgccgcctgcctggtaagaggacaccaggcgtttgatgttggccagccccgggacggactgaagctggtgcgcaaggacaggcttgtcctgagttacgtgagggaagaggcaggaaagctagacttttgtgatggtcacagccctgcggtgactattacatttgtttgcccgtcggagcggagagagggcaccattcccaaactcacagctaaatccaactgccgctatgaaattgagtggattactgagtatgcctgccacagagattacctggaaagtaaaacttgttctctgagcggcgagcagcaggatgtctccatagacctcacaccacttgcccagagcggaggttcatcctatatttcagatggaaaagaatatttgttttatttgaatgtctgtggagaaactgaaatacagttctgtaataaaaaacaagctgcagtttgccaagtgaaaaagagcgatacctctcaagtcaaagcagcaggaagataccacaatcagaccctccgatattcggatggagacctcaccttgatatattttggaggtgatgaatgcagctcagggtttcagcggatgagcgtcataaactttgagtgcaataaaaccgcaggtaacgatgggaaaggaactcctgtattcacaggggaggttgactgcacctacttcttcacatgggacacggaatacgcctgtgttaaggagaaggaagacctcctctgcggtgccaccgacgggaagaagcgctatgacctgtccgcgctggtccgccatgcagaaccagagcagaattgggaagctgtggatggcagtcagacggaaacagagaagaagcattttttcattaatatttgtcacagagtgctgcaggaaggcaaggcacgagggtgtcccgaggacgcggcagtgtgtgcagtggataaaaatggaagtaaaaatctgggaaaatttatttcctctcccatgaaagagaaaggaaacattcaactctcttattcagatggtgatgattgtggtcatggcaagaaaattaaaactaatatcacacttgtatgcaagccaggtgatctggaaagtgcaccagtgttgagaacttctggggaaggcggttgcttttatgagtttgagtggcgcacagctgcggcctgtgtgctgtctaagacagaaggggagaactgcacggtctttgactcccaggcagggttttcttttgacttatcacctctcacaaagaaaaatggtgcctataaagttgagacaaagaagtatgacttttatataaatgtgtgtggcccggtgtctgtgagcccctgtcagccagactcaggagcctgccaggtggcaaaaagtgatgagaagacttggaacttgggtctgagtaatgcgaagctttcatattatgatgggatgatccaactgaactacagaggcggcacaccctataacaatgaaagacacacaccgagagctacgctcatcacctttctctgtgatcgagacgcgggagtgggcttccctgaatatcaggaagaggataactccacctacaacttccggtggtacaccagctatgcctgcccggaggagcccctggaatgcgtagtgaccgacccctccacgctggagcagtacgacctctccagtctggcaaaatctgaaggtggccttggaggaaactggtatgccatggacaactcaggggaacatgtcacgtggaggaaatactacattaacgtgtgtcggcctctgaatccagtgccgggctgcaaccgatatgcatcggcttgccagatgaagtatgaaaaagatcagggctccttcactgaagtggtttccatcagtaacttgggaatggcaaagaccggcccggtggttgaggacagcggcagcctccttctggaatacgtgaatgggtcggcctgcaccaccagcgatggcagacagaccacatataccacgaggatccatctcgtctgctccaggggcaggctgaacagccaccccatcttttctctcaactgggagtgtgtggtcagtttcctgtggaacacagaggctgcctgtcccattcagacaacgacggatacagaccaggcttgctctataagggatcccaacagtggatttgtgtttaatcttaatccgctaaacagttcgcaaggatataacgtctctggcattgggaagatttttatgtttaatgtctgcggcacaatgcctgtctgtgggaccatcctgggaaaacctgcttctggctgtgaggcagaaacccaaactgaagagctcaagaattggaagccagcaaggccagtcggaattgagaaaagcctccagctgtccacagagggcttcatcactctgacctacaaagggcctctctctgccaaaggtaccgctgatgcttttatcgtccgctttgtttgcaatgatgatgtttactcagggcccctcaaattcctgcatcaagatatcgactctgggcaagggatccgaaacacttactttgagtttgaaaccgcgttggcctgtgttccttctccagtggactgccaagtcaccgacctggctggaaatgagtacgacctgactggcctaagcacagtcaggaaaccttggacggctgttgacacctctgtcgatgggagaaagaggactttctatttgagcgtttgcaatcctctcccttacattcctggatgccagggcagcgcagtggggtcttgcttagtgtcagaaggcaatagctggaatctgggtgtggtgcagatgagtccccaagccgcggcgaatggatctttgagcatcatgtatgtcaacggtgacaagtgtgggaaccagcgcttctccaccaggatcacgtttgagtgtgctcagatatcgggctcaccagcatttcagcttcaggatggttgtgagtacgtgtttatctggagaactgtggaagcctgtcccgttgtcagagtggaaggggacaactgtgaggtgaaagacccaaggcatggcaacttgtatgacctgaagcccctgggcctcaacgacaccatcgtgagcgctggcgaatacacttattacttccgggtctgtgggaagctttcctcagacgtctgccccacaagtgacaagtccaaggtggtctcctcatgtcaggaaaagcgggaaccgcagggatttcacaaagtggcaggtctcctgactcagaagctaacttatgaaaatggcttgttaaaaatgaacttcacggggggggacacttgccataaggtttatcagcgctccacagccatcttcttctactgtgaccgcggcacccagcggccagtatttctaaaggagacttcagattgttcctacttgtttgagtggcgaacgcagtatgcctgcccacctttcgatctgactgaatgttcattcaaagatggggctggcaactccttcgacctctcgtccctgtcaaggtacagtgacaactgggaagccatcactgggacgggggacccggagcactacctcatcaatgtctgcaagtctctggccccgcaggctggcactgagccgtgccctccagaagcagccgcgtgtctgctgggtggctccaagcccgtgaacctcggcagggtaagggacggacctcagtggagagatggcataattgtcctgaaatacgttgatggcgacttatgtccagatgggattcggaaaaagtcaaccaccatccgattcacctgcagcgagagccaagtgaactccaggcccatgttcatcagcgccgtggaggactgtgagtacacctttgcctggcccacagccacagcctgtcccatgaagagcaacgagcatgatgactgccaggtcaccaacccaagcacaggacacctgtttgatctgagctccttaagtggcagggcgggattcacagctgcttacagcgagaaggggttggtttacatgagcatctgtggggagaatgaaaactgccctcctggcgtgggggcctgctttggacagaccaggattagcgtgggcaaggccaacaagaggctgagatacgtggaccaggtcctgcagctggtgtacaaggatgggtccccttgtccctccaaatccggcctgagctataagagtgtgatcagtttcgtgtgcaggcctgaggccgggccaaccaataggcccatgctcatctccctggacaagcagacatgcactctcttcttctcctggcacacgccgctggcctgcgagcaagcgaccgaatgttccgtgaggaatggaagctctattgttgacttgtctccccttattcatcgcactggtggttatgaggcttatgatgagagtgaggatgatgcctccgataccaaccctgatttctacatcaatatttgtcagccactaaatcccatgcacgcagtgccctgtcctgccggagccgctgtgtgcaaagttcctattgatggtccccccatagatatcggccgggtagcaggaccaccaatactcaatccaatagcaaatgagatttacttgaattttgaaagcagtactccttgcttagcggacaagcatttcaactacacctcgctcatcgcgtttcactgtaagagaggtgtgagcatgggaacgcctaagctgttaaggaccagcgagtgcgactttgtgttcgaatgggagactcctgtcgtctgtcctgatgaagtgaggatggatggctgtaccctgacagatgagcagctcctctacagcttcaacttgtccagcctttccacgagcacctttaaggtgactcgcgactcgcgcacctacagcgttggggtgtgcacctttgcagtcgggccagaacaaggaggctgtaaggacggaggagtctgtctgctctcaggcaccaagggggcatcctttggacggctgcaatcaatgaaactggattacaggcaccaggatgaagcggtcgttttaagttacgtgaatggtgatcgttgccctccagaaaccgatgacggcgtcccctgtgtcttccccttcatattcaatgggaagagctacgaggagtgcatcatagagagcagggcgaagctgtggtgtagcacaactgcggactacgacagagaccacgagtggggcttctgcagacactcaaacagctaccggacatccagcatcatatttaagtgtgatgaagatgaggacattgggaggccacaagtcttcagtgaagtgcgtgggtgtgatgtgacatttgagtggaaaacaaaagttgtctgccctccaaagaagttggagtgcaaattcgtccagaaacacaaaacctacgacctgcggctgctctcctctctcaccgggtcctggtccctggtccacaacggagtctcgtactatataaatctgtgccagaaaatatataaagggcccctgggctgctctgaaagggccagcatttgcagaaggaccacaactggtgacgtccaggtcctgggactcgttcacacgcagaagctgggtgtcataggtgacaaagttgttgtcacgtactccaaaggttatccgtgtggtggaaataagaccgcatcctccgtgatagaattgacctgtacaaagacggtgggcagacctgcattcaagaggtttgatatcgacagctgcacttactacttcagctgggactcccgggctgcctgcgccgtgaagcctcaggaggtgcagatggtgaatgggaccatcaccaaccctataaatggcaagagcttcagcctcggagatatttattttaagctgttcagagcctctggggacatgaggaccaatggggacaactacctgtatgagatccaactttcctccatcacaagctccagaaacccggcgtgctctggagccaacatatgccaggtgaagcccaacgatcagcacttcagtcggaaagttggaacctctgacaagaccaagtactaccttcaagacggcgatctcgatgtcgtgtttgcctcttcctctaagtgcggaaaggataagaccaagtctgtttcttccaccatcttcttccactgtgaccctctggtggaggacgggatccccgagttcagtcacgagactgccgactgccagtacctcttctcttggtacacctcagccgtgtgtcctctgggggtgggctttgacagcgagaatcccggggacgacgggcagatgcacaaggggctgtcagaacggagccaggcagtcggcgcggtgctcagcctgctgctggtggcgctcacctgctgcctgctggccctgttgctctacaagaaggagaggagggaaacagtgataagtaagctgaccacttgctgtaggagaagttccaacgtgtcctacaaatactcaaaggtgaataaggaagaagagacagatgagaatgaaacagagtggctgatggaagagatccagctgcctcctccacggcagggaaaggaagggcaggagaacggccatattaccaccaagtcagtgaaagccctcagctccctgcatggggatgaccaggacagtgaggatgaggttctgaccatcccagaggtgaaagttcactcgggcaggggagctggggcagagagctcccacccagtgagaaacgcacagagcaatgcccttcaggagcgtgaggacgatagggtggggctggtcaggggtgagaaggcgaggaaagggaagtccagctctgcacagcagaagacagtgagctccaccaagctggtgtccttccatgacgacagcgacgaggacctcttacacatctgactccgcagtgcctgcaggggagcacggagccgcgggacagccaagcacctccaaccaaataagacttccactcgatgatgcttctataattttgcctttaacagaaactttcaaaagggaagagtttttgtgatgggggagagggtgaaggaggtcaggccccactccttcctgattgtttacagtcattggaataaggcatggctcagatcggccacagggcggtaccttgtgcccagggttttgccccaagtcctcatttaaaagcataaggccggacgcatctcaaaacagagggctgcattcgaagaaacccttgctgctttagtcccgatagggtatttgaccccgatatattttagcattttaattctctccccctatttattgactttgacaattactcaggtttgagaaaaaggaaaaaaaaacagccaccgtttcttcctgccagcaggggtgtgatgtaccagtttgtccatcttgagatggtgaggctgtcagtgtatggggcagcttccggcgggatgttgaactggtcattaatgtgtcccctgagttggagctcattctgtctcttttctcttttgctttctgtttcttaagggcacacacacgtgcgtgcgagcacacacacacatacgtgcacagggtccccgagtgcctaggttttggagagtttgcctgttctatgcctttagtcaggaatggctgcacctttttgcatgatatcttcaagcctgggcgtacagagcacatttgtcagtatttttgccggctggtgaattcaaacaacctgcccaaagattgatttgtgtgtttgtgtgtgtgtgtgtgtgtgtgtgtgtgtgtgagtggagttgaggtgtcagagaaaatgaattttttccagatttggggtataggtctcatctcttcaggttctcatgataccacctttactgtgcttatttttttaagaaaaaagtgttgatcaaccattcgacctataagaagccttaatttgcacagtgtgtgacttacagaaactgcatgaaaaatcatgggccagagcctcggccctagcattgcacttggcctcatgctggagggaggctgggcgggtacagcgcggaggaggagggaggccaggcgggcatggcgtggaggaggagggaggccgggcggtcacagcatggaggaggagggaggcgctgctggtgttcttattctggcggcagcgcctttcctgccatgtttagtgaatgacttttctcgcattgtagaattgtatatagactctggtgttctattgctgagaagcaaaccgccctgcagcatccctcagcctgtaccggtttggctggcttgtttgatttcaacatgagtgtattttttaaaattgatttttctcttcatttttttttcaatcaactttactgtaatataaagtattcaacaatttcaataaaagataaattattaaaa

SEQ ID NO: 74 - DNA, 2447 bp, Homo sapiens
  ref <308>: DATABASE ACCESSION NUMBER: NM_000903
cccggcaaccacgagcccagccaatcagcgccccggactgcaccagagccatggtcggcagaagagcactgatcgtactggctcactcagagaggacctccttcaactatgccatgaaggaggctgctgcagcggctttgaagaagaaaggatgggaggtggtggagtcggacctctatgccatgaacttcaatcccatcatttccagaaaggacatcacaggtaaactgaaggaccctgcgaactttcagtatcctgccgagtctgttctggcttataaagaaggccatctgagcccagatattgtggctgaacaaaagaagctggaagccgcagaccttgtgatattccagttccccctgcagtggtttggagtccctgccattctgaaaggctggtttgagcgagtgttcataggagagtttgcttacacttacgctgccatgtatgacaaaggacccttccggagtaagaaggcagtgctttccatcaccactggtggcagtggctccatgtactctctgcaagggatccacggggacatgaatgtcattctctggccaattcagagtggcattctgcatttctgtggcttccaagtcttagaacctcaactgacatatagcattgggcacactccagcagacgcccgaattcaaatcctggaaggatggaagaaacgcctggagaatatttgggatgagacaccactgtattttgctccaagcagcctctttgacctaaacttccaggcaggattcttaatgaaaaaagaggtacaggatgaggagaaaaacaagaaatttggcctttctgtgggccatcacttgggcaagtccatcccaactgacaaccagatcaaagctagaaaatgagattccttagcctggatttccttctaacatgttatcaaatctgggtatctttccaggcttccctgacttgctttagtttttaagatttgtgtttttctttttccacaaggaataaatgagagggaatcgaccgtattcgtgcatttttggatgcatttttaactgattcttatgattactatcatggcatataaccaaaatccgactgggctcaagaggccacttagggaaagatgtagaaagatgctagaaaaatgttctttaaaggcatctacacaatttaattcctctttttagggtcaaagtttagggtacagttggctaggtatcattcaactctccaatgttctattaatcacctctctgtagtttatggtcagaagggaattgctcagagaaggtaaaagactgaatctacctgcctaagggacttaacttgtttggtagttagccatctaatgcttgtttatgatatttcttgctttcaattacaaagcagttactaatatgcctagcacaagtaccactcttggtcagcttttgttgtttatatacagtacacagataccttgaaaggaagagctaataaatctcttctttgctgcagtcatctactttttttttaattaaaaaaaattttttttgaagcagtcttgctctgttacccaggctggagtgcagtggtgtgatctcggctcactgcaacctctgcctcccaggttccagcaattctcctgcctcagcctccctagtagctgggatgacaggcgcctgccatcatgcctgactaatttttgtatttttagtagagacggcgtttcaccatgttggccaggctggtctcaaactcctgacctcaggtgatccgcctacctcagcctcccaaagtgctgggattacaggcgtgatccaccacacctggcccttgcaatcttctactttaaggtttgcagagataaaccaataaatccacaccgtacatctgcaatatgaattccaagaaaggaaatagtaccttcaatacttaaaaatagtcttccacaaaaaatactttatttctgatctatacaaattttcagaaggttattttctttatcattgctaaactgatgacttaccatgggatggggtccagtcccatgaccttggggtacaattgtaaacctagagttttatcaactttggtgaacagttttggcataatagtcaatttctacttctggaagtcatctcattccactgttggtattatataattcaaggagaatatgataaaacactgccctcttgtggtgcattgaaagaagagatgagaaatgatgaaaaggttgcctgaaaaatgggagacagcctcttacttgccaagaaaatgaagggattggaccgagctggaaaacctcctttaccagatgctgactggcactggtggtttttgctctcgacatatccacaatagctgacggctgggtgtttcagtttgcaaaatattttgttgccttcatcttcactgcaattttgtgtaaatttctcaaagatctaattaaataaataaaattcatttctacagactca

SEQ ID NO: 75 - DNA, 5003 bp, Homo sapiens
  ref <308>: DATABASE ACCESSION NUMBER: NM_000926
ggatccattttataagctcaaagataattacttttcagactaagaatatttagggtaaaaagtactgttcaacatctctactgaggatgttatgatgtagcacactctataagctggagctaaaggaaactttccttaaagtgctatttactaaaaattggaacacattccttaagacaaatcgaagtgtggcacacaacatccaaacttccatcatagatacagaggtgttaccatctcccactcccaaatttctttgtcacgctgaggatactcaagaggagcaggacatgttggtcgcagcaggagaaacttgaaagcattcacttttatggaactcataagggagagaatctcttatttagtatcgtccttgatacatttattattttaaaagataatgtagccaaatgtcttcctctgtgttaaatctttacaaaactgaaatcttaaaatggtgacaaaaattctacttctgatagaatctattcatttttccaattagatagggcataattcttaatttgcaaaacaaaacgtaatatgcttatgaggttccatcccaaagaacctgctattgagagtagcattcagaataacgggtggaaatgccaactccagagtttcagatcctaccggtaattggggtagggaggggctttgggcggggcctccctagaggaggaggcgttgttagaaagctgtctggccagtccacagctgtcactaatcggggtaagccttgttgtatttgcgcgtgtgggtggcattctcaatgagaactagcttcacttgtcatttgagtgaaatctacaacccgaggcggctagtgctcccgcactactgggatctgagatcttcggagatgactgtcgcccgcagtacggagccagcagaagtccgacccttcctgggaatgggctgtaccgagaggtccgactagccccagggttttagtgagggggcagtggaactcagcgagggactgagagcttcacagcatgcacgagtttgatgccagagaaaaagtcgggagataaaggagccgcgtgtcactaaattgccgtcgcagccgcagccactcaagtgccggacttgtgagtactctgcgtctccagtcctcggacagaagttggagaactctcttggagaactccccgagttaggagacgagatctcctaacaattactactttttcttgcgctccccacttgccgctcgctgggacaaacgacagccacagttcccctgacgacaggatggaggccaagggcaggagctgaccagcgccgccctcccccgcccccgacccaggaggtggagatcctccggtccagccacattcaacacccactttctcctccctctgcccctatattcccgaaaccccctcctccttcccttttccctcctccctggagacgggggaggagaaaaggggagtccagtcgtcatgactgagctgaaggcaaagggtccccgggctccccacgtggcgggcggcccgccctcccccgaggtcggatccccactgctgtgtcgcccagccgcaggtccgttcccggggagccagacctcggacaccttgcctgaagtttcggccatacctatctccctggacgggctactcttccctcggccctgccagggacaggacccctccgacgaaaagacgcaggaccagcagtcgctgtcggacgtggagggcgcatattccagagctgaagctacaaggggtgctggaggcagcagttctagtcccccagaaaaggacagcggactgctggacagtgtcttggacactctgttggcgccctcaggtcccgggcagagccaacccagccctcccgcctgcgaggtcaccagctcttggtgcctgtttggccccgaacttcccgaagatccaccggctgcccccgccacccagcgggtgttgtccccgctcatgagccggtccgggtgcaaggttggagacagctccgggacggcagctgcccataaagtgctgccccggggcctgtcaccagcccggcagctgctgctcccggcctctgagagccctcactggtccggggccccagtgaagccgtctccgcaggccgctgcggtggaggttgaggaggaggatagctctgagtccgaggagtctgcgggtccgcttctgaagggcaaacctcgggctctgggtggcgcggcggctggaggaggagccgcggcttgtccgccgggggcggcagcaggaggcgtcgccctggtccccaaggaagattcccgcttctcagcgcccagggtcgccctggtggagcaggacgcgccgatggcgcccgggcgctccccgctggccaccacggtgatggatttcatccacgtgcctatcctgcctctcaatcacgccttattggcagcccgcactcggcagctgctggaagacgaaagttacgacggcggggccggggctgccagcgcctttgccccgccgcggacttcaccctgtgcctcgtccaccccggtcgctgtaggcgacttccccgactgcgcgtacccgcccgacgccgagcccaaggacgacgcgtaccctctctatagcgacttccagccgcccgctctaaagataaaggaggaggaggaaggcgcggaggcctccgcgcgctccccgcgttcctaccttgtggccggtgccaaccccgcagccttcccggatttcccgttggggccaccgcccccgctgccgccgcgagcgaccccatccagacccggggaagcggcggtgacggccgcacccgccagtgcctcagtctcgtctgcgtcctcctcggggtcgaccctggagtgcatcctgtacaaagcggagggcgcgccgccccagcagggcccgttcgcgccgccgccctgcaaggcgccgggcgcgagcggctgcctgctcccgcgggacggcctgccctccacctccgcctctgccgccgccgccggggcggcccccgcgctctaccctgcactcggcctcaacgggctcccgcagctcggctaccaggccgccgtgctcaaggagggcctgccgcaggtctacccgccctatctcaactacctgaggccggattcagaagccagccagagcccacaatacagcttcgagtcattacctcagaagatttgtttaatctgtggggatgaagcatcaggctgtcattatggtgtccttacctgtgggagctgtaaggtcttctttaagagggcaatggaagggcagcacaactacttatgtgctggaagaaatgactgcatcgttgataaaatccgcagaaaaaactgcccagcatgtcgccttagaaagtgctgtcaggctggcatggtccttggaggtcgaaaatttaaaaagttcaataaagtcagagttgtgagagcactggatgctgttgctctcccacagccattgggcgttccaaatgaaagccaagccctaagccagagattcactttttcaccaggtcaagacatacagttgattccaccactgatcaacctgttaatgagcattgaaccagatgtgatctatgcaggacatgacaacacaaaacctgacacctccagttctttgctgacaagtcttaatcaactaggcgagaggcaacttctttcagtagtcaagtggtctaaatcattgccaggttttcgaaacttacatattgatgaccagataactctcattcagtattcttggatgagcttaatggtgtttggtctaggatggagatcctacaaacatgtcagtgggcagatgctgtattttgcacctgatctaatactaaatgaacagcggatgaaagaatcatcattctattcattatgccttaccatgtggcagatcccacaggagtttgtcaagcttcaagttagccaagaagagttcctctgtatgaaagtattgttacttcttaatacaattcctttggaagggctacgaagtcaaacccagtttgaggagatgaggtcaagctacattagagagctcatcaaggcaattggtttgaggcaaaaaggagttgtgtcgagctcacagcgtttctatcaacttacaaaacttcttgataacttgcatgatcttgtcaaacagcttcatctgtactgcttgaatacatttatccagtcccgggcactgagtgttgaatttccagaaatgatgtctgaagttattgctgcacaattacccaagatattggcagggatggtgaaaccccttctctttcataaaaagtgaatgtcatctttttcttttaaagaattaaattttgtggcatgtctttttgttttggtcaggattatgaggtcttgagtttttataatgttcttctgaaagccttacatttataacatcatagtgtgtaaatttaaaagaaaaattgtgaggttctaattattttcttttataaagtataattagaatgtttaactgttttgtttacccatattttcttgaagaatttacaagattgaaaaagtactaaaattgttaaagtaaactatatcttatccatattatttcataccatgtaggtgaggatttttaacttttgcatctaacaaatcatcgacttaagagaaaaaatcttacatgtaataacacaaagctattatatgttatttctaggtaactccctttgtgtcaattatatttccaaaaatgaacctttaaaatggtatgcaaaattttgtctatatatatttgtgtgaggaggaaattcataactttcctcagattttcaaaagtatttttaatgcaaaaaatgtagaaagagtttaaaaccactaaaatagattgatgttcttcaaactaggcaaaacaactcatatgttaagaccattttccagattggaaacacaaatctcttaggaagttaataagtagattcatatcattatacaaatagtattgtgggttttgtaggtttttaaaataaccttttttggggagagaattgtcctctaatgaggtattgcgagtggc

SEQ ID NO: 76 - DNA, 4643 bp, Homo sapiens
  ref <308>: DATABASE ACCESSION NUMBER: NM_000927
cctactctattcagatattctccagattcctaaagattagagatcatttctcattctcctaggagtactcacttcaggaagcaaccagataaaagagaggtgcaacggaagccagaacattcctcctggaaattcaacctgtttcgcagtttctcgaggaatcagcattcagtcaatccgggccgggagcagtcatctgtggtgaggctgattggctgggcaggaacagcgccggggcgtgggctgagcacagcgcttcgctctctttgccacaggaagcctgagctcattcgagtagcggctcttccaagctcaaagaagcagaggccgctgttcgtttcctttaggtctttccactaaagtcggagtatcttcttccaagatttcacgtcttggtggccgttccaaggagcgcgaggtcgggatggatcttgaaggggaccgcaatggaggagcaaagaagaagaacttttttaaactgaacaataaaagtgaaaaagataagaaggaaaagaaaccaactgtcagtgtattttcaatgtttcgctattcaaattggcttgacaagttgtatatggtggtgggaactttggctgccatcatccatggggctggacttcctctcatgatgctggtgtttggagaaatgacagatatctttgcaaatgcaggaaatttagaagatctgatgtcaaacatcactaatagaagtgatatcaatgatacagggttcttcatgaatctggaggaagacatgaccaggtatgcctattattacagtggaattggtgctggggtgctggttgctgcttacattcaggtttcattttggtgcctggcagctggaagacaaatacacaaaattagaaaacagttttttcatgctataatgcgacaggagataggctggtttgatgtgcacgatgttggggagcttaacacccgacttacagatgatgtctccaagattaatgaaggaattggtgacaaaattggaatgttctttcagtcaatggcaacatttttcactgggtttatagtaggatttacacgtggttggaagctaacccttgtgattttggccatcagtcctgttcttggactgtcagctgctgtctgggcaaagatactatcttcatttactgataaagaactcttagcgtatgcaaaagctggagcagtagctgaagaggtcttggcagcaattagaactgtgattgcatttggaggacaaaagaaagaacttgaaaggtacaacaaaaatttagaagaagctaaaagaattgggataaagaaagctattacagccaatatttctataggtgctgctttcctgctgatctatgcatcttatgctctggccttctggtatgggaccaccttggtcctctcaggggaatattctattggacaagtactcactgtattttctgtattaattggggcttttagtgttggacaggcatctccaagcattgaagcatttgcaaatgcaagaggagcagcttatgaaatcttcaagataattgataataagccaagtattgacagctattcgaagagtgggcacaaaccagataatattaagggaaatttggaattcagaaatgttcacttcagttacccatctcgaaaagaagttaagatcttgaagggtctgaacctgaaggtgcagagtgggcagacggtggccctggttggaaacagtggctgtgggaagagcacaacagtccagctgatgcagaggctctatgaccccacagaggggatggtcagtgttgatggacaggatattaggaccataaatgtaaggtttctacgggaaatcattggtgtggtgagtcaggaacctgtattgtttgccaccacgatagctgaaaacattcgctatggccgtgaaaatgtcaccatggatgagattgagaaagctgtcaaggaagccaatgcctatgactttatcatgaaactgcctcataaatttgacaccctggttggagagagaggggcccagttgagtggtgggcagaagcagaggatcgccattgcacgtgccctggttcgcaaccccaagatcctcctgctggatgaggccacgtcagccttggacacagaaagcgaagcagtggttcaggtggctctggataaggccagaaaaggtcggaccaccattgtgatagctcatcgtttgtctacagttcgtaatgctgacgtcatcgctggtttcgatgatggagtcattgtggagaaaggaaatcatgatgaactcatgaaagagaaaggcatttacttcaaacttgtcacaatgcagacagcaggaaatgaagttgaattagaaaatgcagctgatgaatccaaaagtgaaattgatgccttggaaatgtcttcaaatgattcaagatccagtctaataagaaaaagatcaactcgtaggagtgtccgtggatcacaagcccaagacagaaagcttagtaccaaagaggctctggatgaaagtatacctccagtttccttttggaggattatgaagctaaatttaactgaatggccttattttgttgttggtgtattttgtgccattataaatggaggcctgcaaccagcatttgcaataatattttcaaagattataggggtttttacaagaattgatgatcctgaaacaaaacgacagaatagtaacttgttttcactattgtttctagcccttggaattatttcttttattacatttttccttcagggtttcacatttggcaaagctggagagatcctcaccaagcggctccgatacatggttttccgatccatgctcagacaggatgtgagttggtttgatgaccctaaaaacaccactggagcattgactaccaggctcgccaatgatgctgctcaagttaaaggggctataggttccaggcttgctgtaattacccagaatatagcaaatcttgggacaggaataattatatccttcatctatggttggcaactaacactgttactcttagcaattgtacccatcattgcaatagcaggagttgttgaaatgaaaatgttgtctggacaagcactgaaagataagaaagaactagaaggtgctgggaagatcgctactgaagcaatagaaaacttccgaaccgttgtttctttgactcaggagcagaagtttgaacatatgtatgctcagagtttgcaggtaccatacagaaactctttgaggaaagcacacatctttggaattacattttccttcacccaggcaatgatgtatttttcctatgctggatgtttccggtttggagcctacttggtggcacataaactcatgagctttgaggatgttctgttagtattttcagctgttgtctttggtgccatggccgtggggcaagtcagttcatttgctcctgactatgccaaagccaaaatatcagcagcccacatcatcatgatcattgaaaaaacccctttgattgacagctacagcacggaaggcctaatgccgaacacattggaaggaaatgtcacatttggtgaagttgtattcaactatcccacccgaccggacatcccagtgcttcagggactgagcctggaggtgaagaagggccagacgctggctctggtgggcagcagtggctgtgggaagagcacagtggtccagctcctggagcggttctacgaccccttggcagggaaagtgctgcttgatggcaaagaaataaagcgactgaatgttcagtggctccgagcacacctgggcatcgtgtcccaggagcccatcctgtttgactgcagcattgctgagaacattgcctatggagacaacagccgggtggtgtcacaggaagagattgtgagggcagcaaaggaggccaacatacatgccttcatcgagtcactgcctaataaatatagcactaaagtaggagacaaaggaactcagctctctggtggccagaaacaacgcattgccatagctcgtgcccttgttagacagcctcatattttgcttttggatgaagccacgtcagctctggatacagaaagtgaaaaggttgtccaagaagccctggacaaagccagagaaggccgcacctgcattgtgattgctcaccgcctgtccaccatccagaatgcagacttaatagtggtgtttcagaatggcagagtcaaggagcatggcacgcatcagcagctgctggcacagaaaggcatctatttttcaatggtcagtgtccaggctggaacaaagcgccagtgaactctgactgtatgagatgttaaatactttttaatatttgtttagatatgacatttattcaaagttaaaagcaaacacttacagaattatgaagaggtatctgtttaacatttcctcagtcaagttcagagtcttcagagacttcgtaattaaaggaacagagtgagagacatcatcaagtggagagaaatcatagtttaaactgcattataaattttataacagaattaaagtagattttaaaagataaaatgtgtaattttgtttatattttcccatttggactgtaactgactgccttgctaaaagattatagaagtagcaaaaagtattgaaatgtttgcataaagtgtctataataaaactaaactttcatgtg

SEQ ID NO: 77 - DNA, 513 bp, Homo sapiens
  ref <308>: DATABASE ACCESSION NUMBER: NM_000988
tccttctttcctttttgctgtaggcccgggtggttgctgccgaaatgggcaagttcatgaaacctgggaaggtggtgcttgtcctggctggacgctactccggacgcaaagctgtcatcgtgaagaacattgatgatggcacctcagatcgcccctacagccatgctctggtggctggaattgaccgctacccccgcaaagtgacagctgccatgggcaagaagaagatcgccaagagatcaaagataaaatcttttgtgaaagtgtataactacaatcacctaatgcccacaaggtactctgtggatatccccttggacaaaactgtcgtcaataaggatgtcttcagagatcctgctcttaaacgcaaggcccgacgggaggccaaggtcaagtttgaagagagatacaagacaggcaagaacaagtggttcttccagaaactgcggttttagatgctttgttttgatcattaaaaattataaagaaaaaaaaaaaaaaaaaaaaaaaaaa

SEQ ID NO: 78 - DNA, 2500 bp, Homo sapiens
  ref <308>: DATABASE ACCESSION NUMBER: NM_001034
cccaggcgcagccaatgggaagggtcggaggcatggcacagccaatgggaagggccggggcaccaaagccaatgggaagggccgggagcgcgcggcgcgggagatttaaaggctgctggagtgaggggtcgcccgtgcaccctgtcccagccgtcctgtcctggctgctcgctctgcttcgctgcgcctccactatgctctccctccgtgtcccgctcgcgcccatcacggacccgcagcagctgcagctctcgccgctgaaggggctcagcttggtcgacaaggagaacacgccgccggccctgagcgggacccgcgtcctggccagcaagaccgcgaggaggatcttccaggagcccacggagccgaaaactaaagcagctgcccccggcgtggaggatgagccgctgctgagagaaaacccccgccgctttgtcatcttccccatcgagtaccatgatatctggcagatgtataagaaggcagaggcttccttttggaccgccgaggaggttgacctctccaaggacattcagcactgggaatccctgaaacccgaggagagatattttatatcccatgttctggctttctttgcagcaagcgatggcatagtaaatgaaaacttggtggagcgatttagccaagaagttcagattacagaagcccgctgtttctatggcttccaaattgccatggaaaacatacattctgaaatgtatagtcttcttattgacacttacataaaagatcccaaagaaagggaatttctcttcaatgccattgaaacgatgccttgtgtcaagaagaaggcagactgggccttgcgctggattggggacaaagaggctacctatggtgaacgtgttgtagcctttgctgcagtggaaggcattttcttttccggttcttttgcgtcgatattctggctcaagaaacgaggactgatgcctggcctcacattttctaatgaacttattagcagagatgagggtttacactgtgattttgcttgcctgatgttcaaacacctggtacacaaaccatcggaggagagagtaagagaaataattatcaatgctgttcggatagaacaggagttcctcactgaggccttgcctgtgaagctcattgggatgaattgcactctaatgaagcaatacattgagtttgtggcagacagacttatgctggaactgggttttagcaaggttttcagagtagagaacccatttgactttatggagaatatttcactggaaggaaagactaacttctttgagaagagagtaggcgagtatcagaggatgggagtgatgtcaagtccaacagagaattcttttaccttggatgctgacttctaaatgaactgaagatgtgcccttacttggctgattttttttttccatctcataagaaaaatcagctgaagtgttaccaactagccacaccatgaattgtccgtaatgttcattaacagcatctttaaaactgtgtagctacctcacaaccagtcctgtctgtttatagtgctggtagtatcaccttttgccagaaggcctggctggctgtgacttaccatagcagtgacaatggcagtcttggctttaaagtgaggggtgaccctttagtgagcttagcacagcgggattaaacagtcctttaaccagcacagccagttaaaagatgcagcctcactgcttcaacgcagattttaatgtttacttaaatataaacctggcactttacaaacaaataaacattgttttgtactcacggcggcgataatagcttgatttatttggtttctacaccaaatacattctcctgaccactaatgggagccaattcacaattcactaagtgactaaagtaagttaaacttgtgtagactaagcatgtaatttttaagttttattttaatgaattaaaatatttgttaaccaactttaaagtcagtcctgtgtatacctagatattagtcagttggtgccagatagaagacaggttgtgtttttatcctgtggcttgtgtagtgtcctgggattctctgccccctctgagtagagtgttgtgggataaaggaatctctcagggcaaggagcttcttaagttaaatcactagaaatttaggggtgatctgggccttcatatgtgtgagaagccgtttcattttatttctcactgtattttcctcaacgtctggttgatgagaaaaaattcttgaagagttttcatatgtgggagctaaggtagtattgtaaaatttcaagtcatccttaaacaaaatgatccacctaagatcttgcccctgttaagtggtgaaatcaactagaggtggttcctacaagttgttcattctagttttgtttggtgtaagtaggttgtgtgagttaattcatttatatttactatgtctgttaaatcagaaattttttattatctatgttcttctagattttacctgtagttcataaaaaaaaaaaaaaaaaaaaaaaaa

SEQ ID NO: 79 - DNA, 1536 bp, Homo sapiens
  ref <308>: DATABASE ACCESSION NUMBER: NM_001071
ggggggggggggaccacttggcctgcctccgtcccgccgcgccacttggcctgcctccgtcccgccgcgccacttcgcctgcctccgtcccccgcccgccgcgccatgcctgtggccggctcggagctgccgcgccggcccttgccccccgccgcacaggagcgggacgccgagccgcgtccgccgcacggggagctgcagtacctggggcagatccaacacatcctccgctgcggcgtcaggaaggacgaccgcacgggcaccggcaccctgtcggtattcggcatgcaggcgcgctacagcctgagagatgaattccctctgctgacaaccaaacgtgtgttctggaagggtgttttggaggagttgctgtggtttatcaagggatccacaaatgctaaagagctgtcttccaagggagtgaaaatctgggatgccaatggatcccgagactttttggacagcctgggattctccaccagagaagaaggggacttgggcccagtttatggcttccagtggaggcattttggggcagaatacagagatatggaatcagattattcaggacagggagttgaccaactgcaaagagtgattgacaccatcaaaaccaaccctgacgacagaagaatcatcatgtgcgcttggaatccaagagatcttcctctgatggcgctgcctccatgccatgccctctgccagttctatgtggtgaacagtgagctgtcctgccagctgtaccagagatcgggagacatgggcctcggtgtgcctttcaacatcgccagctacgccctgctcacgtacatgattgcgcacatcacgggcctgaagccaggtgactttatacacactttgggagatgcacatatttacctgaatcacatcgagccactgaaaattcagcttcagcgagaacccagacctttcccaaagctcaggattcttcgaaaagttgagaaaattgatgacttcaaagctgaagactttcagattgaagggtacaatccgcatccaactattaaaatggaaatggctgtttagggtgctttcaaaggagcttgaaggatattgtcagtctttaggggttgggctggatgccgaggtaaaagttctttttgctctaaaagaaaaaggaactaggtcaaaaatctgtccgtgacctatcagttattaatttttaaggatgttgccactggcaaatgtaactgtgccagttctttccataataaaaggctttgagttaactcactgagggtatctgacaatgctgaggttatgaacaaagtgaggagaatgaaatgtatgtgctcttagcaaaaacatgtatgtgcatttcaatcccacgtacttataaagaaggttggtgaatttcacaagctatttttggaatatttttagaatattttaagaatttcacaagctattccctcaaatctgagggagctgagtaacaccatcgatcatgatgtagagtgtggttatgaactttatagttgttttatatgttgctataataaagaagtgttctgc

SEQ ID NO: 80 - DNA, 6853 bp, Homo sapiens
  ref <308>: DATABASE ACCESSION NUMBER: NM_001128
gctctgccaggagcagtcgcctcctccttggcaaatagtcctcggcagggtccgagttcttggataattcgagagaaaaggcacgataagttgcagtacgaggacacggaaacgaccaggagaggaggacagggagcgaagtttcctcaatagtgtgtgaagttagttaaaaactccctccttcctcaggatccctccgcctgcggtagcggtggtgaggccgagggagccgccattttggatgttcggttcctgctgccactgctgccgccgcccccggagctgctggtttcattcgaggtttcgggccgaggatgccagcccccatcagattgcgggagctgatccggaccatccggacagcccgaacccaagctgaagaacgagaaatgatccagaaagaatgtgctgcaatccggtcatcttttagagaagaagacaatacataccgatgtcggaatgtggcaaaattactgtatatgcacatgctgggctaccctgctcactttggacagttggagtgcctcaagcttattgcctctcaaaaatttacagacaaacgcattggctatttaggggcaatgctgctgttagatgaaagacaagatgtccatcttctcatgaccaactgtatcaagaatgatcttaatcatagcacgcaattcgtacaggggttagcactttgtaccctcggctgcatgggctcctcagagatgtgcagagatcttgcaggagaggtagagaagctcctgaaaacctccaactcttacttaagaaaaaaggcagcactgtgtgctgttcatgtcatcaggaaagttcctgaacttatggagatgtttttaccagcaacaaaaaatttattgaatgagaagaaccatggtgtcctccacacatctgtagtcctcctcacagaaatgtgtgagcgaagcccagacatgcttgcgcatttcagaaagtctctgcagcttgtgccccaattagttcgtattttaaagaacctcatcatgtccggatattcaccagaacatgatgtttctggtatcagtgacccctttttgcaggtacgaattttgcggttattaagaattttaggacgaaatgatgatgattcaagtgaagctatgaatgatatattagcacaggttgccactaatactgagactagtaaaaatgtaggaaatgctattctttatgaaacggttttgactatcatggatattaagtcagagagtggattgcgagtcctagccataaatatcctgggtcgtttcttattgaacaatgacaagaatattagatatgtggctctgacatctttgttgaagactgtacagacagatcataatgcagtacagaggcacagaagcacaattgtggactgtcttaaagatttggatgtctcaataaaacggcgtgcaatggaattgagttttgccctggtaaatgggaataatatccgaggcatgatgaaagaattactttattttctggattcgtgtgagccagaatttaaagcagactgtgcatctggaatctttcttgctgcagaaaagtatgcaccttccaaacgatggcatatagacacaattatgcgtgttttgacaacggcaggaagttatgttcgtgatgatgcagtccccaatttaatccagttaataactaatagtgtggagatgcatgcctatactgtccagcgcctgtacaaagcaattcttggtgattattctcaacaacctttggtacaagtggctgcatggtgtataggtgaatatggtgatcttcttgtatctggccagtgtgaagaggaagagcctattcaggtaacagaggatgaagtgttggatattttagaaagtgtcctaatctctaatatgtccacctctgtgacacgaggttatgccctcactgccattatgaagctttccactcgattcacttgtactgtaaaccgaattaagaaagtggtttccatctacggaagcagcattgatgtggaactccagcagagggcagtagaatataatgcacttttcaagaaatatgaccacatgaggtctgccctacttgagagaatgcctgtcatggaaaaagtgaccacaaatggccctactgagattgtgcagacaaatggagagacagaaccagctccactagagaccaaaccgccaccctctgggccacagcccaccagccaggccaatgatttattggatttgttgggaggaaatgacataacacctgttattccaactgcgcctacaagcaaaccatcttctgctggtggagaacttcttgatttgctgggagacatcaaccttacaggtgctccagctgctgctcctgcccctgcctcagtcccacagatatcccagccccccttcttgttggatgggctttcatcacagcctctcttcaatgatattgctgcaggcatcccctccatcacagcatacagtaagaatggcttgaagatagaattcacctttgaacggtcaaataccaaccccagtgtaacagtgataacgatacaggcctccaacagcacagagctagatatgacggactttgttttccaagctgcagtaccaaagacattccagctgcagctcttgtctcctagcagcagcattgtcccagcatttaacacggggaccatcacacaagtcattaaagttctgaaccctcagaagcaacagctgcgaatgcggatcaagcttacatataatcacaagggctcagcaatgcaagatctagcagaggtgaacaactttccccctcagtcctggcaatgagggtttggcaccattctcattctttatcccactcaatcaaaggaactctgggaaggaggttgtgattgctggcaagtcccccccaactgtaccacgggcatgaggagctgaagagaactgctgaggaggattttcctaaagttactgctgaccttgaagcattgttaaagactaatgtcctctcctccactgttgaggctggctgcttctggaggctactttgcactcttcctcttctcctttttccgcacttctccacccctcccacatttacagccagaatcaacattccctgggcccctgaggaaataagcagctggtctggaggagaggactgcaatccatggcgaaaaaacactcactttgtctctgcagcaaagagttgccccttctttctactgttgtttctctgtggactgggcaaggtggggtatttattcctcactagctgggttaccatcttcaggcacttttaacatctggcattcggaatggaaatgtaataatggacattagggagccctgcctttttctactggttcccccaatgtttgaaagaggcattaggctcctggtagccttttctgtgcattgctgtatacacacagacacacacatgtatgtttgttaccaagaactggtcagaccttgcgagtttatttgtaaacactggacagatggagttaaaaagagcttttgttgagatttggcatgaaggatatggtgctctatttgtaatagaaacttccaaggctcttccagctcccctttctcgccattctttagctgtagtcatgaatagtctccatgattttcaaaattgattccctttaaagtgcaaaatggtcaccttctaaaagatatattcatagttattaatgaccctattcccaccacaaattttaaagtgctcctaagcccataacttgcctgtttgaactatggtaatgggtggaagaggagttcaccagtttcaaagatcagactctgtatcaaaagtacctttgcccttaggaagagtgagtattggagtcatcttatctattactccaaacctccctttttatttcttgagcctggcttggaccttggcattccgtttgaattccttctaactggaacatttgtgttgtatctgtaacactggcactgaaataaagaccacacggttaaagaaatctttccatattgtactttatggtgttggagtgaagccttgtagcttccatacccctatgtcagaggaggtcttacggacaccatagggtaggaatagcctttcctcagtctgagaaattggtctcttttaaaagacgaatctcatgaatattcacatcaaagacttgagctttttaaactagtgagagtgccaagtgctttttagaaaggacccatatgttatcaaactttgaaattgagttgctggaatgaagtagaggtgactctctctgtggtacacattgaatgtactatgtatgttcaagtattcaggcgccatgtcttatatactgaagaaagaaaaagtgaggcccaccttgctcttacaatgtttgcaattgttactgtattgaatacagtataatgactactatggcttcaatcttaaacctggaaacaaatatccctttttttccccttcatttcaccaagcctttacttaaaatcttcagtgtcttgtcaaatctagctctgtatcagatgctggaatattcctaacatttgacaaactggagttgaactaaaggctccacgggaaagtttctggtcttactagtgtgtatgagcaagatctgctaaaacttactccactgggtaaatggttgactgagtcaagaacaggataatatctcctgcatagttttcagtaatgtaagtgtggactagtgcatatttcagacaactgctctgcctgtgcaatgaaaaatagcctttaagggtttctttgcagactgatttcattggatggatacttaatgctgtgaaacatgataggattaacataatgttggtggatttcttgaatagaatttgtcttaacattcctctttgtgtagaggctttattttctctcttatatttgtagctaaccagctcaggtttttttatttgaactgggttgaatctctgaagaaatctgttcaagaccatgctataagacactgtcagctaatggagctgggaagggtctactctgctgacagagcatttccttgggtgatcatagtttcgaggtagagtttatgatcattcatagctttgtctagaaggagtaaaatatcatggccttaacacaaagggtgctgcgtagaatatgaattgattttggaatcagaacacaagcaccatactgaaggactagcagccaaataactgcctaggatactgatggttgtgaagactgtttcaaatgattggatctttgaaagcttcagcgtgccttagtttctaggatcagaattagttttcctctcacttggccttgcagctaaatggagaaatgtttcaatttctttgaatacttgcacatttcaataattcctttcccgagtataaccactcaagggggagcaaatttggatggatttacgacttcacaggcattgtgaggaaagagcattttccaaggctgttttgataaccctggggtgataagcagtgagccctcacacacttactttgacaatttcacatgcacttgtacttcattatttccctcttcaagagtcgtttctattctagtttctgccccatcccggggaatcctaaaggagaattaattcatctaagtaatctcaaaaaactgtaggaagggtgctctccctgagaagcttctcccacagtgctttggtgctgttaccttgaggtggtttggacagtcacggaagttttaggctgtgcatagtgatcatctgttaattttaaggtctttatcatttaaagaaacattcctcagtgtaacatttgggaggggattctttcctcttgctagtttaaaggtgtgatttgtactccttgtttgtcccattcatatatgaaaatagacttttaaaactgtccaacactaatggtttatataacatgcttcccattttttttatgtcgtagaaattggaagttagggagtactgctttcaaggttcaacttcattatcttctgcattggaaaatatttgggccatgagaactaggggaaaggagtttgaatgtgtctatttttttctagtgaatgtattttaaccacagtgtcctaaactgagaaaactagagaggaaaaagtgggtgttcatgaactttgtagttgggagagtggttttacatgtctgtgtattcatgactttgggagtgggtaggatcattggagagagaattgcacagaaagtcctgaagtttaaaacacttttgaccagctttggctcgggagagtggggctgcttgtagaactggaagtgaataactttttcaagcaatatcagtgagtgggtcccatcgacagggttccaggacctggaacactttaacagaaggaaatgccgaagcagcttgcacagttgctttacagacttccaagaggctgattctggcttcaagatggagccttggagttggtttttttttttttttttttcttccctcaaagaacctgcggttgcgctttgtgtgttttgtttttgttttccatttgggggccccatgggaaagagcttctgaactctttcctttatgaactcccactgtgttcctataaaggcccttttctttcttagtgttgtaagttacattttcattatgccccatcacatcttctttactgtaaaaatattaaaaagctgtttccaagtgggacagctaatgaagctctaattattgcagacatatttttgagatgtaaaaaaaaaaatttaaagttaaatgataagtcttagaggcgagtgaggaataaaatggatgtaaacatttacatgggatgcattagaattctgctgtgtgtactgtcttttggttgaaacaaattatgaacagtgactaataataaaaagtcaatacccaaaaaaaaaaaaaaa

SEQ ID NO: 81 - DNA, 3702 bp, Homo sapiens
  ref <308>: DATABASE ACCESSION NUMBER: NM_001211
gtttgttagggagtcgtgtgcgtgccttggtcgcttctgtagctccgagggcaggttgcggaagaaagcccaggcggtctgtggcccagaggaaaggcctgcagcaggacgaggacctgagccaggaatgcaggatggcggcggtgaagaaggaagggggtgctctgagtgaagccatgtccctggagggagatgaatgggaactgagtaaagaaaatgtacaacctttaaggcaagggcggatcatgtccacgcttcagggagcactggcacaagaatctgcctgtaacaatactcttcagcagcagaaacgggcatttgaatatgaaattcgattttacactggaaatgaccctctggatgtttgggataggtatatcagctggacagagcagaactatcctcaaggtgggaaggagagtaatatgtcaacgttattagaaagagctgtagaagcactacaaggagaaaaacgatattatagtgatcctcgatttctcaatctctggcttaaattagggcgtttatgcaatgagcctttggatatgtacagttacttgcacaaccaagggattggtgtttcacttgctcagttctatatctcatgggcagaagaatatgaagctagagaaaactttaggaaagcagatgcgatatttcaggaagggattcaacagaaggctgaaccactagaaagactacagtcccagcaccgacaattccaagctcgagtgtctcggcaaactctgttggcacttgagaaagaagaagaggaggaagtttttgagtcttctgtaccacaacgaagcacactagctgaactaaagagcaaagggaaaaagacagcaagagctccaatcatccgtgtaggaggtgctctcaaggctccaagccagaacagaggactccaaaatccatttcctcaacagatgcaaaataatagtagaattactgtttttgatgaaaatgctgatgaggcttctacagcagagttgtctaagcctacagtccagccatggatagcaccccccatgcccagggccaaagagaatgagctgcaagcaggcccttggaacacaggcaggtccttggaacacaggcctcgtggcaatacagcttcactgatagctgtacccgctgtgcttcccagtttcactccatatgtggaagagactgcacaacagccagttatgacaccatgtaaaattgaacctagtataaaccacatcctaagcaccagaaagcctggaaaggaagaaggagattctctacaaagggttcagagccatcagcaagcgtctgaggagaagaaagagaagatgatgtattgtaaggagaagatttatgcaggagtaggggaattctcctttgaagaaattcgggctgaagttttccggaagaaattaaaagagcaaagggaagccgagctattgaccagtgcagagaagagagcagaaatgcagaaacagattgaagagatggagaagaagctaaaagaaatccaaactactcagcaagaaagaacaggtgatcagcaagaagagacgatgcctacaaaggagacaactaaactgcaaattgcttccgagtctcagaaaataccaggaatgactctatccagttctgtttgtcaagtaaactgttgtgccagagaaacttcacttgcggagaacatttggcaggaacaacctcattctaaaggtcccagtgtacctttctccatttttgatgagtttcttctttcagaaaagaagaataaaagtcctcctgcagatcccccacgagttttagctcaacgaagaccccttgcagttctcaaaacctcagaaagcatcacctcaaatgaagatgtgtctccagatgtttgtgatgaatttacaggaattgaacccttgagcgaggatgccattatcacaggcttcagaaatgtaacaatttgtcctaacccagaagacacttgtgactttgccagagcagctcgttttgtatccactccttttcatgagataatgtccttgaaggatctcccttctgatcctgagagactgttaccggaagaagatctagatgtaaagacctctgaggaccagcagacagcttgtggcactatctacagtcagactctcagcatcaagaagctgagcccaattattgaagacagtcgtgaagccacacactcctctggcttctctggttcttctgcctcggttgcaagcacctcctccatcaaatgtcttcaaattcctgagaaactagaacttactaatgagacttcagaaaaccctactcagtcaccatggtgttcacagtatcgcagacagctactgaagtccctaccagagttaagtgcctctgcagagttgtgtatagaagacagaccaatgcctaagttggaaattgagaaggaaattgaattaggtaatgaggattactgcattaaacgagaatacctaatatgtgaagattacaagttattctgggtggcgccaagaaactctgcagaattaacagtaataaaggtatcttctcaacctgtcccatgggacttttatatcaacctcaagttaaaggaacgtttaaatgaagattttgatcatttttgcagctgttatcaatatcaagatggctgtattgtttggcaccaatatataaactgcttcacccttcaggatcttctccaacacagtgaatatattacccatgaaataacagtgttgattatttataaccttttgacaatagtggagatgctacacaaagcagaaatagtccatggtgacttgagtccaaggtgtctgattctcagaaacagaatccacgatccctatgattgtaacaagaacaatcaagctttgaagatagtggacttttcctacagtgttgaccttagggtgcagctggatgtttttaccctcagcggctttcggactgtacagatcctggaaggacaaaagatcctggctaactgttcttctccctaccaggtagacctgtttggtatagcagatttagcacatttactattgttcaaggaacacctacaggtcttctgggatgggtccttctggaaacttagccaaaatatttctgagctaaaagatggtgaattgtggaataaattctttgtgcggattctgaatgccaatgatgaggccacagtgtctgttcttggggagcttgcagcagaaatgaatggggtttttgacactacattccaaagtcacctgaacaaagccttatggaaggtagggaagttaactagtcctggggctttgctctttcagtgagctaggcaatcaagtctcacagattgctgcctcagagcaatggttgtattgtggaacactgaaactgtatgtgctgtaatttaatttaggacacatttagatgcactaccattgctgttctactttttggtacaggtatattttgacgtcactgatattttttatacagtgatatacttactcatggccttgtctaacttttgtgaagaactattttattctaaacagactcattacaaatggttaccttgttatttaacccatttgtctctacttttccctgtacttttcccatttgtaatttgtaaaatgttctcttatgatcaccatgtattttgtaaataataaaatagtatctgttaaaaaaaaaaaaaaaaaaaaaaaaaaaaaaaaaaaaaaaaaaaaaaaaaaaaaa

SEQ ID NO: 82 - DNA, 2528 bp, Homo sapiens
  ref <308>: DATABASE ACCESSION NUMBER: NM_001232
aaaaatcagcctgtctgctctctccttgctcaacaaggcctctaacagtcttctgtcctctattctgcacacggcatatttgggaacgagaaacccaaagttttcccaaatgaagagaactcacttgtttattgtggggatttattttctgtcctcttgcagggcagaagaggggcttaatttccccacatatgatgggaaggaccgagtggtaagtctttccgagaagaacttcaagcaggttttaaagaaatatgacttgctttgcctctactaccatgagccggtgtcttcagataaggtcacgccaaaacagttccaactgaaagaaatcgtgcttgagcttgtggcccaggtccttgaacataaagctataggctttgtgatggtggatgccaagaaagaagccaagcttgccaagaaactgggttttgatgaagaaggaagcctgtatattcttaagggtgatcgcacaatagagtttgatggcgagtttgcagctgatgtcttggtggagttcctcttggatctaattgaagacccagtggagatcatcagcagcaaactggaagtccaagccttcgaacgcattgaagactacatcaaactcattggctttttcaagagtgaggactcagaatactacaaggcttttgaagaagcagctgaacacttccagccttacatcaaattctttgccacctttgacaaaggggttgcaaagaaattatctttgaagatgaatgaggttgacttctatgagccatttatggatgagcccattgccatccccaacaaaccttacacagaagaggagctggtggagtttgtgaaggaacaccaaagacccactctacgtcgcctgcgcccagaagaaatgtttgaaacatgggaagatgatttgaatgggatccacattgtggcctttgcagagaagagtgatccagatggctacgaattcctggagatcctgaaacaggttgcccgggacaatactgacaaccccgatctgagcatcctgtggatcgacccggacgactttcctctgctcgttgcctactgggagaagactttcaagattgacctattcaggccacagattggggtggtgaatgtcacagatgctgacagtgtctggatggagattccagatgatgacgatcttccaactgctgaggagctggaggactggattgaggatgtgctttctggaaagataaacactgaagatgatgatgaagatgatgatgatgatgataattctgatgaagaggataatgatgacagtgatgacgatgatgatgaatagcccaactccaaacaattctgatgaaaacaaaatcacagcacccactaccatacagacagcacaaggtggcagcaagcaattctgccccacacccagccagctcctttcccttttccatcatctcttttcccactccctttgcgtcaggagcagcatcattcagcaaatgccttttcaaatgcagcaatcccacttagcagggacaggagaaaaattattcccatgttgactgtcttgactgtcacggaacagatcttgttctttgctggaccatcaagggtcatggcagtgcctgaacatggcagtctagggtgaacaatcccctaacacaagtttacttgtctttgattatgacagtaacaaaattgacagctttctaactcacaggcatagagtgaccttttaatcagagcccagggaagacacatgattaatgatttagctccctccatacctcgaacatcagttgggatccctcctccagccaagatgatccttcttagagaaggctcagccttggaagcaaacttataaatcatattctcatggctttgttaaacttatttcaagtgatggtcattcatatcactatgaacttggatattcaagcctttggatggctatggagagggcttgaaatgtgtacaggtgtcaccatcatttctagtatattaggaaactgggatgggaggttgatttgctctctaaacttccctctagttggcaagtctcacatattcatcagcaggagtggagggtgggggaaaactagaaagatgaaaacttttacatttttctgatgggttcatgtctctgattgggtcagctggcttcctagcctaagctgggatctgaataccccttctctgtagctgctagtgagccttcccatttagattaaagattgctttatccagcagtcaattaactctccagttatcagtactcccacaattggccagggcaacaataattggagttcatactgatgccctgaggcactgaaaaaaaaaaaaatcccaaagtgccttctgagctgtctaaaagttacattgtgcttggtagatttagtgttaagtgtgcagtataattttctaatttattttctcaatcttttagcacatgtgtaagacactgtgcaaatttttggaaaatagagcaatactttttgtggaatactagctaactaattctgtcattaaactcatattttggaaat

SEQ ID NO: 83 - DNA, 1682 bp, Homo sapiens
  ref <308>: DATABASE ACCESSION NUMBER: NM_001237
cggcagccagcctattctttggccgggtcggtgcgagtggtcggctgggcagagtgcacgctgcttggcgccgcaggctgatcccgccgtccactcccgggagcagtgatgttgggcaactctgcgccggggcctgcgacccgcgaggcgggctcggcgctgctagcattgcagcagacggcgctccaagaggaccaggagaatatcaacccggaaaaggcagcgcccgtccaacaaccgcggacccgggccgcgctggcggtactgaagtccgggaacccgcggggtctagcgcagcagcagaggccgaagacgagacgggttgcaccccttaaggatcttcctgtaaatgatgagcatgtcaccgttcctccttggaaagcaaacagtaaacagcctgcgttcaccattcatgtggatgaagcagaaaaagaagctcagaagaagccagctgaatctcaaaaaatagagcgtgaagatgccctggcttttaattcagccattagtttacctggacccagaaaaccattggtccctcttgattatccaatggatggtagttttgagtcaccacatactatggacatgtcaattgtattagaagatgaaaagccagtgagtgttaatgaagtaccagactaccatgaggatattcacacataccttagggaaatggaggttaaatgtaaacctaaagtgggttacatgaagaaacagccagacatcactaacagtatgagagctatcctcgtggactggttagttgaagtaggagaagaatataaactacagaatgagaccctgcatttggctgtgaactacattgataggttcctgtcttccatgtcagtgctgagaggaaaacttcagcttgtgggcactgctgctatgctgttagcctcaaagtttgaagaaatataccccccagaagtagcagagtttgtgtacattacagatgatacctacaccaagaaacaagttctgagaatggagcatctagttttgaaagtccttacttttgacttagctgctccaacagtaaatcagtttcttacccaatactttctgcatcagcagcctgcaaactgcaaagttgaaagtttagcaatgtttttgggagaattaagtttgatagatgctgacccatacctcaagtatttgccatcagttattgctggagctgcctttcatttagcactctacacagtcacgggacaaagctggcctgaatcattaatacgaaagactggatataccctggaaagtcttaagccttgtctcatggaccttcaccagacctacctcaaagcaccacagcatgcacaacagtcaataagagaaaagtacaaaaattcaaagtatcatggtgtttctctcctcaacccaccagagacactaaatctgtaacaatgaaagactgcctttgttttctaagatgtaaatcactcaaagtatatggtgtacagtttttaacttaggttttaattttacaatcatttctgaatacagaagttgtggccaagtacaaattatggtatctattactttttaaatggttttaatttgtatatcttttgtatatgtatctgtcttagatatttggctaattttaagtggttttgttaaagtattaatgatgccagctgtcaggataataaattgatttggaaaacttaaaaaaa

SEQ ID NO: 84 - DNA, 2042 bp, Homo sapiens
  ref <308>: DATABASE ACCESSION NUMBER: NM_001274
ggggccagtcgttcgccggaaagcatttgtctcccacctcatcataacaacaattaatttcctctggggcctgaggagggcagaatttcaaccttcggtgtgcttgggagtggcgattgtgatttacacgacaaaatgccgaggtgctcggtggagtcatggcagtgccctttgtggaagactgggacttggtgcaaaccctgggagaaggtgcctatggagaagttcaacttgctgtgaatagagtaactgaagaagcagtcgcagtgaagattgtagatatgaagcgtgccgtagactgtccagaaaatattaagaaagagatctgtatcaataaaatgctaaatcatgaaaatgtagtaaaattctatggtcacaggagagaaggcaatatccaatatttatttctggagtactgtagtggaggagagctttttgacagaatagagccagacataggcatgcctgaaccagatgctcagagattcttccatcaactcatggcaggggtggtttatctgcatggtattggaataactcacagggatattaaaccagaaaatcttctgttggatgaaagggataacctcaaaatctcagactttggcttggcaacagtatttcggtataataatcgtgagcgtttgttgaacaagatgtgtggtactttaccatatgttgctccagaacttctgaagagaagagaatttcatgcagaaccagttgatgtttggtcctgtggaatagtacttactgcaatgctcgctggagaattgccatgggaccaacccagtgacagctgtcaggagtattctgactggaaagaaaaaaaaacatacctcaacccttggaaaaaaatcgattctgctcctctagctctgctgcataaaatcttagttgagaatccatcagcaagaattaccattccagacatcaaaaaagatagatggtacaacaaacccctcaagaaaggggcaaaaaggccccgagtcacttcaggtggtgtgtcagagtctcccagtggattttctaagcacattcaatccaatttggacttctctccagtaaacagtgcttctagtgaagaaaatgtgaagtactccagttctcagccagaaccccgcacaggtctttccttatgggataccagcccctcatacattgataaattggtacaagggatcagcttttcccagcccacatgtcctgatcatatgcttttgaatagtcagttacttggcaccccaggatcctcacagaacccctggcagcggttggtcaaaagaatgacacgattctttaccaaattggatgcagacaaatcttatcaatgcctgaaagagacttgtgagaagttgggctatcaatggaagaaaagttgtatgaatcaggttactatatcaacaactgataggagaaacaataaactcattttcaaagtgaatttgttagaaatggatgataaaatattggttgacttccggctttctaagggtgatggattggagttcaagagacacttcctgaagattaaagggaagctgattgatattgtgagcagccagaaggtttggcttcctgccacatgatcggaccatcggctctggggaatcctggtgaatatagtgctgctatgttgacattattcttcctagagaagattatcctgtcctgcaaactgcaaatagtagttcctgaagtgttcacttccctgtttatccaaacatcttccaatttattttgtttgttcggcatacaaataatacctatatcttaattgtaagcaaaactttggggaaaggatgaatagaattcatttgattatttcttcatgtgtgtttagtatctgaatttgaaactcatctggtggaaaccaagtttcaggggacatgagttttccagcttttatacacacgtatctcatttttatcaaaacattttgtttaattcaaaaagtacatatttcttccatgttgatttaattctaagatgaaccaataaagacataattcttgcaaaaaaaaaaaaaaaaaaaaaaaaaa

SEQ ID NO: 85 - DNA, 3748 bp, Homo sapiens
  ref <308>: DATABASE ACCESSION NUMBER: NM_001310
cgtctgtaaacacccagagactgtcatggagggggaggaggaggcggcggcggcgaagggaggcgtttggggccgcctccagggtccgctctgccattcctgaactggtccctcgtccccgtgactctggcatcagggaagcgaactgttaggcgagaggaggaggcagccagaaccatatccccttcttcctcggggcgggggccgggccaggccggctgagccgggggagggctccgggagggagtgcctggccaggccggcctgtctgccgcgatggatgacagtaaggtggttggaggcaaagtaaagaagcccggtaaacgtggtcggaagccagccaaaattgacttgaaagcaaaacttgagaggagccggcagagtgcaagagaatgccgagcccgaaaaaagctgagatatcagtatttggaagagttggtatccagtcgagaaagagctatatgtgccctcagagaggaactggaaatgtacaagcagtggtgcatggcaatggaccaaggaaaaatcccttctgaaataaaggccctactcactggagaagagcagaacaaatctcagcagaactcaagcaggcataccaaggctgggaagacagatgctaatagcaattcctggtgaagattatataaagatgagtcagtgattgaagccaatattctgattcccatggaagatggatgggcaagagtgtacttcttggctccatttactacctactgctcagtagtcatctctgtaaatctgcaatttctaccaaaatgtgtgatcgtagatctcaaaggatcttgctttaactttcaacacttagaaaatctacaaacattcagacctgtctgggttggtattgccacccatgacatttaacatgttgtgatgcttgaaaacacaggagtagagaaaatcgatgaagattgtatttttgcaccttaactccacattgctttattggttaatttatattctttccatgtaattcatgtaattgtatgtctgtgtgtgttttatgtgtcaccacctttcatgtttttgattgccctacaaagagaaaccaaatgagctgattactgactataagttctcagcctttatggacctaatcttatttttatttacttgagtaatgtttattctctgcatgaaccatgatttctcctgtgagccattccagcataagctgtgaatatgtattaacaaatatatacatttctatttttataatccataaggatatgcctgttttaaataacatacatattaacaatatctatcaggaaaaccctcaagacagcttctagttaaaacctttgttgctgtcctctcaaactatatttataaaaatttgctagggccaaatccatacttgcagaataattcatcaaattttatttttaagtgaaaagtaacctttcaggcatttcagcagcatacattgacaatctagggtatatatgtatgtatgtttcttattgtatgtctatatatgtatgtggggaggacaggagtgaatgttcacacacttttcttgcgtactcaactaaattggagaatgtttctgaagaaaattggatgaaattagctgctgagattgagtttctgccttaaaatctgaaacaaaaaaagggacaaattgctggtagatctactgactgtagccatcaccagaacacttagtttcttcccagacatgaatttcctgacaggctctgagccagaaacacactgtgggcgtgcatctggttcagccctggatatgcctccactgtggagggaagcattggaactggagttgtgcacagcaccgcagctagtgggcctggctgggggtgcagaagggcagggtagttctttccatttccccttgcagctacacttactttctccctgactaccaaatggagtgacggttgaagaatcaagctcataatatgatacacccagacagacccagaaatcttttgatttccccagcgagatacttaccactctctcttctctttcccatggttaaaacaggagttgtgttctctgtcgctgctaaattattcttcacttgagtgaagcaaatatttagcttccaaataaagtatattttgttctgaactggcagtttaagaggagataccgtagtctagattgtctttgaggtagaatatatgatggaccacatagtttaagattacaaggtactttccctcttctctcaggccatgcatttgaataaagtgcctcccttagcctgagctcctaaagacctcttgtacttggttgcaaactcagatctctagtctagtctagtctagtctagtctagtcatgtgtgactgtgtactgagataccactagcccagtttgctgggtctctatgttttggaagttgggggtttaataatatttaatgtctttttaggatcataaacataaataggtttgttgatattcaggccttcagaatttaagggttttaaatatagcattcagattgtaattggtatgtttttgccatctggtccactcaattgtatatttttattttgcaaaacaacccaaaacttactttatgttgctttgttcagtaccttttgaattcccccagaagagttgttttcaaaacaaacattccagaatgaatgtcgctcttcaatggaacgtctttattgtgcttgaagtatttcttctctggttgtaattctaaattacagagtcatttgagctttctcccctcccgctagtatctttacaggagcagggaagagcagtagaggatgtataattttgggcgaagttaaattacaatttatttgaggttattcctaaacctatttatttggtgttttggaggagatcacacactaagagaacgttgattgcctcggctattgtgctggctggacactttggtcacttttgaagcatgttaataaatgtcactgattaaaacagctggagcatttccttccctttccagtgaaggagcagcatagtgaaatcctggcacccctcacctttttgtgatgacaagatggctgacagtcacggagtccaggagaaggtgctgctctccttgctttctgagtaaacagagtaatgttttttttcttattttcccaaagaaagaaaagggggaaaatatatttgtatgtttagaccagccaaattctgtcattattttagtatcaacctgctgtatattagagcaactgaatataatatggaataagtttgaccaggtcaagttttaggatatagttgaatttctttaaaaagttttctattttatctaaaatctttctattatatctaaattagaatgatcatcctgcgcaaattcagattactgtttgctggctaattgacagtatttctcagcatcactatgtagcattctgttttagcatctttgaattatgatcatttgatttggctaattacaaaaagtacaggtttaaactggacttaccttgagttaaaggcaaagaaaatctaaaaacataaatgttatatttcacaagaaatcagttgcatattatccattacatatttagttttaaaaggaggagtcaccttgaattattttctgagtcaccttgagttatttgatctctcagcctgctttctcatctgtaaaaaaggggggaggataactttcacagggtaattggtaggctaaataggagttacagaaaactgttaaatagggaagaactacattaaatttaaatattcacatt

SEQ ID NO: 86 - DNA, 2058 bp, Homo sapiens
  ref <308>: DATABASE ACCESSION NUMBER: NM_001463
gttgggaaagagcagcctgggcggcaggggcggtggctggagctcggtaaagctcgtgggaccccattgggggaatttgatccaaggaagcggtgattgccgggggaggagaagctcccagatccttgtgtccacttgcagcgggggaggcggagacggcggagcgggccttttggcgtccactgcgcggctgcaccctgccccatcctgccgggatcatggtctgcggcagcccgggagggatgctgctgctgcgggccgggctgcttgccctggctgctctctgcctgctccgggtgcccggggctcgggctgcagcctgtgagcccgtccgcatccccctgtgcaagtccctgccctggaacatgactaagatgcccaaccacctgcaccacagcactcaggccaacgccatcctggccatcgagcagttcgaaggtctgctgggcacccactgcagccccgatctgctcttcttcctctgtgccatgtacgcgcccatctgcaccattgacttccagcacgagcccatcaagccctgtaagtctgtgtgcgagcgggcccggcagggctgtgagcccatactcatcaagtaccgccactcgtggccggagaacctggcctgcgaggagctgccagtgtacgacaggggcgtgtgcatctctcccgaggccatcgttactgcggacggagctgattttcctatggattctagtaacggaaactgtagaggggcaagcagtgaacgctgtaaatgtaagcctattagagctacacagaagacctatttccggaacaattacaactatgtcattcgggctaaagttaaagagataaagactaagtgccatgatgtgactgcagtagtggaggtgaaggagattctaaagtcctctctggtaaacattccacgggacactgtcaacctctataccagctctggctgcctctgccctccacttaatgttaatgaggaatatatcatcatgggctatgaagatgaggaacgttccagattactcttggtggaaggctctatagctgagaagtggaaggatcgactcggtaaaaaagttaagcgctgggatatgaagcttcgtcatcttggactcagtaaaagtgattctagcaatagtgattccactcagagtcagaagtctggcaggaactcgaacccccggcaagcacgcaactaaatcccgaaatacaaaaagtaacacagtggacttcctattaagacttacttgcattgctggactagcaaaggaaaattgcactattgcacatcatattctattgtttactataaaaatcatgtgataactgattattacttctgtttctcttttggtttctgcttctctcttctctcaacccctttgtaatggtttgggggcagactcttaagtatattgtgagttttctatttcactaatcatgagaaaaactgttcttttgcaataataataaattaaacatgctgttaccagagcctctttgctggagtctccagatgttaatttactttctgcaccccaattgggaatgcaatattggatgaaaagagaggtttctggtattcacagaaagctagatatgccttaaaacatactctgccgatctaattacagccttatttttgtatgccttttgggcattctcctcatgcttagaaagttccaaatgtttataaaggtaaaatggcagtttgaagtcaaatgtcacataggcaaagcaatcaagcaccaggaagtgtttatgaggaaacaacacccaagatgaattatttttgagactgtcaggaagtaaaataaataggagcttaagaaagaacattttgcctgattgagaagcacaactgaaaccagtagccgctggggtgttaatggtagcattcttcttttggcaatacatttgatttgttcatgaatatattaatcagcattagagaaatgaattataactagacatctgctgttatcaccatagttttgtttaatttgcttccttttaaataaacccattggtgaaagtcccaaaaaaaaaaaaaaaaaaaaa

SEQ ID NO: 87 - DNA, 3344 bp, Homo sapiens
  ref <308>: DATABASE ACCESSION NUMBER: NM_001605
ggtacagctgcgcgtctgcgggaataggtgcagcgggcccttggcgggggactctgagggaggagctggggacggcgaccctaggagagttctttggggtgactttcaagatggactctactctaacagcaagtgaaatccggcagcgatttatagatttcttcaagaggaacgagcatacgtatgttcactcgtctgccaccatcccattggatgaccccactttgctctttgccaatgcaggcatgaaccagtttaaacccattttcctgaacacaattgacccatctcaccccatggcaaagctgagcagagctgccaatacccagaagtgcatccgggctgggggcaaacaaaatgacctggacgatgtgggcaaggatgtctatcatcacaccttcttcgagatgctgggctcttggtcttttggagattactttaaggaattggcatgtaagatggctctggaactcctcacccaagagtttggcattcccattgaaagactttatgttacttactttggcggggatgaagcagctggcttagaagcagatctggaatgcaaacagatctggcaaaatttggggctggatgacaccaaaatcctcccaggcaacatgaaggataacttctgggagatgggtgacacgggcccctgtggtccttgcagtgagatccactacgaccggattggtggtcgggacgccgcacatcttgtcaaccaggacgaccctaatgtgctggagatctggaaccttgtgttcatccagtataacagggaagctgatggcattctgaaacctcttcccaagaaaagcattgacacagggatgggcctggaacgactggtatctgtgctgcagaataagatgtccaactatgacactgacctttttgtcccttactttgaagccattcagaagggcacaggtgcccgaccatacactgggaaagttggtgctgaggatgccgatgggattgacatggcctaccgggtgctggctgaccatgctcggaccatcactgtggcactggctgatggtggccggcctgacaacacagggcgtggatatgtgttgagacggattctccgccgagctgtccgatacgcccatgaaaagctcaatgccagcaggggcttctttgctacgttagtggatgttgtcgtccagtccctgggagatgcatttcctgagctgaagaaggacccagacatggtgaaggacatcattaatgaagaagaggtgcagtttctcaagactctcagcagagggcgtcgcatcctggacaggaaaattcagagcctgggagacagcaagaccattcccggagacactgcttggctcctctatgacacctatgggtttccagtggatctgactggactgattgctgaagagaagggcctggtggtagacatggatggctttgaagaggagaggaaactggcccagctgaaatcacagggcaagggagctggtggggaagacctcattatgctggacatttacgctatcgaagagctccgggcacggggtctggaggtcacagatgattccccaaagtacaattaccatttggactccagtggtagctatgtatttgagaacacagtggctacggtgatggctctgcgcagggagaagatgttcgtggaagaggtgtccacaggccaggagtgtggagtggtgctggacaagacctgtttctatgctgagcaaggaggccagatctatgacgaaggctacctggtgaaggtggatgacagcagtgaagataaaacagagtttacagtgaagaatgctcaggtccgaggagggtatgtgctacacattggaaccatctacggtgacctgaaagtgggggatcaggtctggctgtttattgatgagccccgacgaagacccatcatgagcaaccacacagctacgcacattctgaacttcgccctgcgctcagtgcttggggaagctgaccagaaaggctcattggttgctcctgaccgcctcagatttgactttactgccaagggagccatgtccacccaacagatcaagaaggctgaagagattgctaatgagatgattgaggcagccaaggccgtctatacccaggattgccccctggcagcagcgaaagccatccagggcctacgggctgtgtttgatgagacctatcctgaccctgtgcgagtcgtctccattggggtcccggtgtccgagttgctggatgacccctctgggcctgctggctccctgacttctgttgagttctgtgggggaacgcacctgcggaactcgagtcatgcaggagcttttgtgatcgtgacggaagaagccattgccaagggtatccggaggattgtggctgtcacaggtgccgaggcccagaaggccctcaggaaagcagagagcttgaagaaatgtctctctgtcatggaagccaaagtgaaggctcagactgctccaaacaaggatgtgcagagggagatcgctgaccttggagaggccctggccactgcagtcatcccccagtggcagaaggatgaattgcgggagactctcaaatccctaaagaaggtcatggatgacttggaccgagccagcaaagccgatgtccagaaacgagtgttagagaagacgaagcagttcatcgacagcaaccccaaccagcctcttgtcatcctggagatggagagcggcgcctcagccaaggccctgaatgaagccttgaagctcttcaagatgcactcccctcagacttctgccatgctcttcacggtggacaatgaggctggcaagatcacgtgcctgtgtcaagtcccccagaatgcagccaatcggggcttaaaagccagcgagtgggtgcagcaggtgtcaggcttgatggacggtaaaggtggtggcaaggatgtgtctgcacaggccacaggcaagaacgttggctgcctgcaggaggcgctgcagctggccacttccttcgcccagctgcgcctcggggatgtaaagaactgagtggggaaggaggaggctcccactggatccatccgtccagccaagagctcttcatctgctacaagaacatttgaatcttgggacctttaaagagcccctcctaacccagcagtaactggaacacacttgggagcagtcctatgtctcagtgccccttaaatttctgccctgagccctccacgtcagtgccatcggtctagaaccactaaccccgcattgctgttgatcgtcacgctcgcatctatagataacggctctccagacctgagctttccgcgtcagcaagtaggaatcgtttttgctgcagagaataaaaggaccacgtgc

SEQ ID NO: 88 - DNA, 1777 bp, Homo sapiens; identical to SEQ ID NO: 58
  ref <308>: DATABASE ACCESSION NUMBER: NM_001664

SEQ ID NO: 89 - DNA, 1994 bp, Homo sapiens
  ref <308>: DATABASE ACCESSION NUMBER: NM_001673
aaacttcccgcacgcgttacaggagccaggtcggtataagcgccagcggcctcgccgcccgtcaagctgtccacatccctggcctcagcccgccacatcaccctgacctgcttacgcccagattttcttcaatcacatctgaataaatcacttgaagaaagcttatagcttcattgcaccatgtgtggcatttgggcgctgtttggcagtgatgattgcctttctgttcagtgtctgagtgctatgaagattgcacacagaggtccagatgcattccgttttgagaatgtcaatggatacaccaactgctgctttggatttcaccggttggcggtagttgacccgctgtttggaatgcagccaattcgagtgaagaaatatccgtatttgtggctctgttacaatggtgaaatctacaaccataagaagatgcaacagcattttgaatttgaataccagaccaaagtggatggtgagataatccttcatctttatgacaaaggaggaattgagcaaacaatttgtatgttggatggtgtgtttgcatttgttttactggatactgccaataagaaagtgttcctgggtagagatacatatggagtcagacctttgtttaaagcaatgacagaagatggatttttggctgtatgttcagaagctaaaggtcttgttacattgaagcactccgcgactccctttttaaaagtggagccttttcttcctggacactatgaagttttggatttaaagccaaatggcaaagttgcatccgtggaaatggttaaatatcatcactgtcgggatgaacccctgcacgccctctatgacaatgtggagaaactctttccaggttttgagatagaaactgtgaagaacaacctcaggatcctttttaataatgctgtaaagaaacgtttgatgacagacagaaggattggctgccttttatcagggggcttggactccagcttggttgctgccactctgttgaagcagctgaaagaagcccaagtacagtatcctctccagacatttgcaattggcatggaagacagccccgatttactggctgctagaaaggtggcagatcatattggaagtgaacattatgaagtcctttttaactctgaggaaggcattcaggctctggatgaagtcatattttccttggaaacttatgacattacaacagttcgtgcttcagtaggtatgtatttaatttccaagtatattcggaagaacacagatagcgtggtgatcttctctggagaaggatcagatgaacttacgcagggttacatatattttcacaaggctccttctcctgaaaaagccgaggaggagagtgagaggcttctgagggaactctatttgtttgatgttctccgcgcagatcgaactactgctgcccatggtcttgaactgagagtcccatttctagatcatcgattttcttcctattacttgtctctgccaccagaaatgagaattccaaagaatgggatagaaaaacatctcctgagagagacgtttgaggattccaatctgatacccaaagagattctctggcgaccaaaagaagccttcagtgatggaataacttcagttaagaattcctggtttaagattttacaggaatacgttgaacatcaggttgatgatgcaatgatggcaaatgcagcccagaaatttcccttcaatactcctaaaaccaaagaaggatattactaccgtcaagtctttgaacgccattacccaggccgggctgactggctgagccattactggatgcccaagtggatcaatgccactgacccttctgcccgcacgctgacccactacaagtcagctgtcaaagcttaggtggtctttatgctgtaatgtgaaagcaaatatttcttcgtgttggatggggactgtgggtagataggggaacaatgagagtcaactcaggctaacttgggtgtgaaaaaaataaaagtcctaaatct

SEQ ID NO: 90 - DNA, 8972 bp, Homo sapiens
  ref <308>: DATABASE ACCESSION NUMBER: NM_001723
cagctgccacttttcaccgttagaagtagagctttttccagacctcctaccttttagtctactttgaaaggtgaaagaaagaacatcgtttcaggaataaaaatgcacagtagtagttatagttaccgtagcagtgattctgtgtttagtaacactaccagcactcgaaccagtcttgattcaaatgaaaatcttctcttggttcattgtggtccaacactgatcaactcttgcattagcttcggcagtgaatcctttgatggacacaggttagaaatgttgcaacagattgccaacagagttcagagggacagtgtcatctgtgaagacaaactgattcttgctggaaatgctcttcagtctgattctaaaagattagaatcaggagtgcagtttcagaatgaagcagaaattgctgggtatatacttgaatgtgagaaccttttacgccagcatgtaattgatgtacagattcttattgatggaaaatactaccaggcagatcaattggtacagagggttgcaaaactgcgtgacgaaattatggccttaaggaacgaatgttcttctgtgtacagcaaaggacgcatactgacaacagaacagacaaagctcatgatatcaggaatcactcaaagtttaaactcaggatttgcacagaccttacaccctagtctgacctcagggctgacccagagtttaacaccttccctaacctcttctagtatgacttctggcctgtcatcagggatgacttcccgcctgactccatctgtcactccagcttatacacctggtttcccatcaggattagttccaaatttcagttcaggagtagagccaaattcattgcaaactttgaagttgatgcagatccgaaaaccccttctaaagtcttctttgctggatcaaaatttaacagaagaagaaatcaatatgaaatttgttcaggatcttttgaattgggttgatgagatgcaggtacaactggaccgcactgagtggggctcagatttgccaagtgttgaaagccatttagaaaatcataaaaatgttcatagagctattgaagaatttgaatctagtctcaaagaagctaaaatcagtgagattcaaatgacagcacctcttaaactgacttatgcagaaaagttgcacagattagagagtcagtatgcaaaactcttgaatacatccaggaatcaagaacggcaccttgatacactccataattttgtaagtcgtgcgactaatgaacttatttggttgaatgaaaaagaagaggaggaagttgcttatgactggagtgagagaaacaccaacatagctaggaaaaaagattatcatgctgaattaatgagagaacttgatcaaaaggaagaaaatattaaatcagttcaggagatagcagagcagctacttctagaaaatcatccagcccggttaactattgaggcctacagagcggcaatgcagacgcagtggagctggatcttacagctctgccagtgtgtggagcagcacataaaggagaacacagcgtatttcgagtttttcaatgatgccaaagaagctactgattacttaaggaatctaaaagatgccattcagcggaagtacagctgtgatagatcaagcagcattcacaagctagaagaccttgttcaggaatcaatggaagagaaagaagaacttctgcagtacaaaagcactatagcaaacctaatgggaaaagcaaaaacaataattcaactgaagccaaggaattctgactgtccactcaaaacttctattccgatcaaagctatctgtgactacagacaaattgagataaccatttacaaagacgatgaatgtgttttggcgaataactctcatcgtgctaaatggaaggtcattagtcctactgggaatgaggctatggtcccatctgtgtgcttcaccgttcctccaccaaacaaagaagcggtggaccttgccaacagaattgagcaacagtatcagaatgtcctgactctttggcatgagtctcacataaacatgaagagtgtagtatcctggcattatctcatcaatgaaattgatagaattcgagctagcaatgtggcttcaataaagacaatgctacctggtgaacatcagcaagttctaagtaatctacaatctcgttttgaagattttctggaagatagccaggaatcccaagtcttttcaggctcagatataacacaactggaaaaggaggttaatgtatgtaagcagtattatcaagaacttcttaaatctgcagaaagagaggagcaagaggaatcagtttataatctctacatctctgaagttcgaaacattagacttcggttagagaactgtgaagatcggctgattagacagattcgaactcccctggaaagagatgatttgcatgaaagtgtgttcagaatcacagaacaggagaaactaaagaaagagctggaacgacttaaagatgatttgggaacaatcacaaataagtgtgaggagtttttcagtcaagcagcagcctcttcatcagtccctaccctacgatcagagcttaatgtggtccttcagaacatgaaccaagtctattctatgtcttccacttacatagataagttgaaaactgttaacttggtgttaaaaaacactcaagctgcagaagccctcgtaaaactctatgaaactaaactgtgtgaagaagaagcagttatagctgacaagaataatattgagaatctaataagtactttaaagcaatggagatctgaagtagatgaaaagagacaggtattccatgccttagaggatgagttgcagaaagctaaagccatcagtgatgaaatgtttaaaacgtataaagaacgggaccttgattttgactggcacaaagaaaaagcagatcaattagttgaaaggtggcaaaatgttcatgtgcagattgacaacaggttacgggacttagagggcattggcaaatcactgaagtactacagagacacttaccatcctttagatgattggatccagcaggttgaaactactcagagaaagattcaggaaaatcagcctgaaaatagtaaaaccctagccacacagttgaatcaacagaagatgctggtgtccgaaatagaaatgaaacagagcaaaatggacgagtgtcaaaaatatgcagaacagtactcagctacagtgaaggactatgaattacaaacaatgacctaccgggccatggtagattcacaacaaaaatctccagtgaaacgccgaagaatgcagagttcagcagatctcattattcaagagttcatggacctaaggactcgatatactgccctggtcactctcatgacacaatatattaaatttgctggtgattcattgaagaggctggaagaggaggagattaaaaggtgtaaggagacttctgaacatggggcatattcagatctgcttcagcgtcagaaggcaacagtgcttgagaatagcaaacttacaggaaagataagtgagttggaaagaatggtagctgaactaaagaaacaaaagtcccgagtagaggaagaacttccgaaggtcagggaggctgcagaaaatgaattgagaaagcagcagagaaatgtagaagatatctctctgcagaagataagggctgaaagtgaagccaagcagtaccgcagggaacttgaaaccattgtgagagagaaggaagccgctgaaagagaactggagcgggtgaggcagctcaccatagaggccgaggctaaaagagctgccgtggaagagaacctcctgaattttcgcaatcagttggaggaaaacacctttaccagacgaacactggaagatcatcttaaaagaaaagatttaagtctcaatgatttggagcaacaaaaaaataaattaatggaagaattaagaagaaagagagacaatgaggaagaactcttgaagctgataaagcagatggaaaaagaccttgcatttcagaaacaggtagcagagaaacagttgaaagaaaagcagaaaattgaattggaagcaagaagaaaaataactgaaattcagtatacatgtagagaaaatgcattgccagtgtgtccgatcacacaggctacatcatgcagggcagtaacgggtctccagcaagaacatgacaagcagaaagcagaagaactcaaacagcaggtagatgaactaacagctgccaatagaaaggctgaacaagacatgagagagctgacatatgaacttaatgccctccagcttgaaaaaacgtcatctgaggaaaaggctcgtttgctaaaagataaactagatgaaacaaataatacactcagatgccttaagttggagctggaaaggaaggatcaggcggagaaagggtattctcaacaactcagagagcttggtaggcaattgaatcaaaccacaggtaaagctgaagaagccatgcaagaagctagtgatctcaagaaaataaagcgcaattatcagttagaattagaatctcttaatcatgaaaaagggaaactacaaagagaagtagacagaatcacaagggcacatgctgtagctgagaagaatattcagcatttaaattcacaaattcattcttttcgagatgagaaagaattagaaagactacaaatctgccagagaaaatcagatcatctaaaagaacaatttgagaaaagccatgagcagttgcttcaaaatatcaaagctgaaaaagaaaataatgataaaatccaaaggctcaatgaagaattggagaaaagtaatgagtgtgcagagatgctaaaacaaaaagtagaggagcttactaggcagaataatgaaaccaaattaatgatgcagagaattcaggcagaatcagagaatatagttttagagaaacaaactatccagcaaagatgtgaagcactgaaaattcaggcagatggttttaaagatcagctacgcagcacaaatgaacacttgcataaacagacaaaaacagagcaggattttcaaagaaaaattaaatgcctagaagaagacctggcgaaaagtcaaaatttggtaagtgaatttaagcaaaagtgtgaccaacagaacattatcatccagaataccaagaaagaagttagaaatctgaatgcggaactgaatgcttccaaagaagagaagcgacgcggggagcagaaagttcagctacaacaagctcaggtgcaagagttaaataacaggttgaaaaaagtacaagacgaattacacttaaagaccatagaggagcagatgacccacagaaagatggttctgtttcaggaagaatctggtaaattcaaacaatcagcagaggagtttcggaagaagatggaaaaattaatggagtccaaagtcatcactgaaaatgatatttcaggcattaggcttgactttgtgtctcttcaacaagaaaactctagagcccaagaaaatgctaagctttgtgaaacaaacattaaagaacttgaaagacagcttcaacagtatcgtgaacaaatgcagcaagggcagcacatggaagcaaatcattaccaaaaatgtcagaaacttgaggatgagctgatagcccagaagcgtgaggttgaaaacctgaagcaaaaaatggaccaacagatcaaagagcatgaacatcaattagttttgctccagtgtgaaattcaaaaaaagagcacagccaaagactgtaccttcaaaccagattttgagatgacagtgaaggagtgccagcactctggagagctgtcctctagaaacactggacaccttcacccaacacccagatcccctctgttgagatggactcaagaaccacagccattggaagagaagtggcagcatcgggttgttgaacagatacccaaagaagtccaattccagccaccaggggctccactcgagaaagagaaaagccagcagtgttactctgagtacttttctcagacaagcaccgagttacagataacttttgatgagacaaaccccattacaagactgtctgaaattgagaagataagagaccaagccctgaacaattctagaccacctgttaggtatcaagataacgcatgtgaaatggaactggtgaaggttttgacacccttagagatagctaagaacaagcagtatgatatgcatacagaagtcacaacattaaaacaagaaaagaacccagttcccagtgctgaagaatggatgcttgaagggtgcagagcatctggtggactcaagaaaggggatttccttaagaagggcttagaaccagagaccttccagaactttgatggtgatcatgcatgttcagtcagggatgatgaatttaaattccaagggcttaggcacactgtgactgccaggcagttggtggaagctaagcttctggacatgagaacaattgagcagctgcgactcggtcttaagactgttgaagaagttcagaaaactcttaacaagtttctgacgaaagccacctcaattgcagggctttacctagaatctacaaaagaaaagatttcatttgcctcagcggccgagagaatcataatagacaaaatggtggctttggcatttttagaagctcaggctgcaacaggttttataattgatcccatttcaggtcagacatattctgttgaagatgcagttcttaaaggagttgttgaccccgaattcagaattaggcttcttgaggcagagaaggcagctgtgggatattcttattcttctaagacattgtcagtgtttcaagctatggaaaatagaatgcttgacagacaaaaaggtaaacatatcttggaagcccagattgccagtgggggtgtcattgaccctgtgagaggcattcgtgttcctccagaaattgctctgcagcaggggttgttgaataatgccatcttacagtttttacatgagccatccagcaacacaagagttttccctaatcccaataacaagcaagctctgtattactcagaattactgcgaatgtgtgtatttgatgtagagtcccaatgctttctgtttccatttggggagaggaacatttccaatctcaatgtcaagaaaacacatagaatttctgtagtagatactaaaacaggatcagaattgaccgtgtatgaggctttccagagaaacctgattgagaaaagtatatatcttgaactttcagggcagcaatatcagtggaaggaagctatgttttttgaatcctatgggcattcttctcatatgctgactgatactaaaacaggattacacttcaatattaatgaggctatagagcagggaacaattgacaaagccttggtcaaaaagtatcaggaaggcctcatcacacttacagaacttgctgattctttgctgagccggttagtccccaagaaagatttgcacagtcctgttgcagggtattggctgactgctagtggggaaaggatctctgtactaaaagcctcccgtagaaatttggttgatcggattactgccctccgatgccttgaagcccaagtcagtacagggggcataattgatcctcttactggcaaaaagtaccgggtggccgaagctttgcatagaggcctggttgatgaggggtttgcccagcagctgcgacagtgtgaattagtaatcacagggattggccatcccatcactaacaaaatgatgtcagtggtggaagctgtgaatgcaaatattataaataaggaaatgggaatccgatgtttggaatttcagtacttgacaggagggttgatagagccacaggttcactctcggttatcaatagaagaggctctccaagtaggtattatagatgtcctcattgccacaaaactcaaagatcaaaagtcatatgtcagaaatataatatgccctcagacaaaaagaaagttgacatataaagaagccttagaaaaagctgattttgatttccacacaggacttaaactgttagaagtatctgagcccctgatgacaggaatttctagcctctactattcttcctaatgggacatgtttaaataactgtgcaaggggtgatgcaggctggttcatgccactttttcagagtatgatgatatcggctacatatgcagtctgtgaattatgtaacatactctatttcttgagggctgcaaattgctaagtgctcaaaatagagtaagttttaaattgaaaattacataagatttaatgcccttcaaatggtttcatttagccttgagaatggttttttgaaacttggccacactaaaatgtttttttttttacgtagaatgtgggataaacttgatgaactccaagttcacagtgtcatttcttcagaactccccttcattgaatagtgatcatttattaaatgataaattgcactcgctgaaagagcacgtcatgaagcaccatggaatcaaagagaaagatataaattcgttcccacagccttcaagctgcagtgttttagattgcttcaaaaaatgaaaaagttttgcctttttctgtatatagtgaccttctttgcatattaaaatgtttaccacaatgtcccatttctagttaagtcttcgcacttgaaagctaacattatgaatattatgtgttggaggaggggaaggattttcttcattctgtgtattttccttacatgtacagtagacgttctctattctatcagccttctatggtacctttttgtcaggacaattaggattgtaatgctaatgcaaaggcagcaattcaaagatcttctagtgcctcatgaataaagttgagatttaaaatttgtaacattgatggaacagctgggaggttagaccaatcattaaggaatgtatgccatagctttctttgctaccataaacattttggaggtgcatctgctatgtgacatggtaaatatggttaagtgaatgaataaaatgttttagtaa

SEQ ID NO: 91 - DNA, 2562 bp, Homo sapiens
  ref <308>: DATABASE ACCESSION NUMBER: NM_001762
gccgcgccggctctgggcactcagcatcgtttccttttcctccgctggagcagctatggcggcggtgaagaccctgaaccccaaggccgaggtggcccgagcgcaggcggcgctggcggtcaacatcagcgcagcgcggggtctgcaggacgtgctaaggaccaacctggggcccaagggcaccatgaagatgctcgtttctggcgctggagacatcaaacttactaaagacggcaatgtgctgcttcacgaaatgcaaattcaacacccaacagcttccttaatagcaaaggtagcaacagcccaggatgatataactggtgatggtacgacttctaatgtcctaatcattggagagctgctgaaacaggcggatctctacatttctgaaggccttcatcctagaataatcactgaaggatttgaagctgcaaaggaaaaggcccttcagtttttggaagaagtcaaagtaagcagagagatggacagggaaacacttatagatgtggccagaacatctcttcgtactaaagttcatgctgaacttgcagatgtcttaacagaggctgtagtggactccattttggccattaaaaagcaagatgaacctattgatctcttcatgattgagatcatggagatgaaacataaatctgaaactgatacaagcttaatcagagggcttgttttggaccacggagcacggcatcctgatatgaagaaaagggtggaggatgcatacatcctcacttgtaacgtgtcattagagtatgagaaaacagaagtgaattctggctttttttacaagagtgcagaagagagagaaaaactcgtgaaagctgaaagaaaattcattgaagatagggttaaaaaaataatagaactgaaaaggaaagtctgtggcgattcagataaaggatttgttgttattaatcaaaagggaattgaccccttttccttagatgctctttcaaaagaaggcatagtcgctctgcgcagagctaaaaggagaaatatggagaggctgactcttgcttgtggtggggtagccctgaattcttttgacgacctaagtcctgactgcttgggacatgcaggacttgtatatgagtatacattgggagaagagaagtttacctttattgagaaatgtaacaaccctcgttctgtcacattattgatcaaaggaccaaataagcacacactcactcagatcaaagatgcagtgagggacggcttgagggctgtcaaaaatgctattgatgatggctgtgtggttccaggtgctggtgccgtggaagtggcaatggcagaagccctgattaaacataagcccagtgtaaagggcagggcacagcttggagtccaagcatttgctgatgcattgctcattattcccaaggttcttgctcagaactctggttttgaccttcaggaaacattagttaaaattcaagcagaacattcagaatcaggtcagcttgtgggtgtggacctgaacacaggtgagccaatggtggcagcagaagtaggcgtatgggataactattgtgtaaagaaacagcttcttcactcctgcactgtgattgccaccaacattctcttggttgatgagatcatgcgagctggaatgtcttctctgaaaggttgaattgaagcttcctctgtatctgaatcttgaagactgcaaagtgatcctgaggattacagctgtggaatttttgtccaagcttcaaataattttgaaagaaattttcccatatgaaaaaaggagagaacactggcatctgttgaaatttggaagttctgaaattatagtatttttaaaaattgcactgaagtgtatacacataaagcaggtcttttatccagtgaacaggatgttttgctttagcagcagtgacataaaattccatgttagataagcatatgttacttaccttgttattaaatatttcttgaaaagcaaattttaatggttaattttatgtggacgtatgttaaattatccaaactaccctattgttaagcatttggttttaaaatttttatgctaatataaatgctcaagtaatttaaaatattgaaagcatccctgttggtataaatttctgagtaaatgcattggatcagttggactttgaacgccctttgaaatggctttgctaaaatgctcccgccacaaagttgtaggaaatgggaagaggagtcaactagaggcaagggagttgagagagctgcaactgtaaagggcaagaacaggcagaggtaaaaagatgatggaaggtgtggtgactaagggccacggttattgggtgaaatttgagatgtaggccaactgtattttcaagcttctgaacttaaggcaaaatattcatcgcaaagtctctagcgtcatatttttctcacccaaattacgtttccacgagttattatatatagttggtctatctctgcagtccttgaaggtgaagttgtgtgttactaggctgtgttttgggatgtcagcagtggcctgaagtgagttgtgcaataaatgttaagttgaaacctcaaaaaaaa

SEQ ID NO: 92 - DNA, 1207 bp, Homo sapiens
  ref <308>: DATABASE ACCESSION NUMBER: NM_001765
acagagatcagcaaacagcttttctgagagaaagaaacatctgcaaatgacatgctgtttctgcagtttctgctgctagctcttcttctcccaggtggtgacaatgcagacgcatcccaggaacacgtctccttccatgtcatccagatcttctcatttgtcaaccaatcctgggcacgaggtcagggctcaggatggctggacgagttgcagactcatggctgggacagtgaatcaggcacaataattttcctgcataactggtccaagggcaacttcagcaatgaagagttgtcagacctagagttgttatttcgtttctacctctttggattaactcgggagattcaagaccatgcaagtcaagattactcgaaatatccctttgaagtacaggtgaaagcgggctgtgagctgcattctggaaagagcccagaaggcttctttcaggtagctttcaacggattagatttactgagtttccagaatacaacatgggtgccatctccaggctgtggaagtttggcccaaagtgtctgtcatctactcaatcatcagtatgaaggcgtcacagaaacagtgtataatctcataagaagcacttgcccccgatttctcttgggtctcctggatgcagggaagatgtatgtacacaggcaagtgaggccagaagcctggctgtccagtcgccccagccttgggtctggccagctgttgctggtttgtcatgcctccggcttctacccaaagcctgtttgggtgacatggatgcggaatgaacaggagcaactgggcactaaacatggtgatattcttcctaatgctgatgggacatggtatcttcaggtgatcctggaggtggcatctgaggagcctgctggcctgtcttgtcgagtgagacacagcagtctaggaggccaggacatcatcctctactggggacaccactcttccatgaattggattgccttggtagtgatagtgcccttggtgattctaatagtccttgtgttatggtttaagaagcactgctcatatcaggacatcctgtgagactcttccccctgactcccccattgtgttaagaacccagcaacccaggagcctagtacaatatagtgatgccatcccgtcgactctccatttaaattgtttctctttctgcataataaacatttgttaataaaaaccaaaaaaaaaaaaaaaa

SEQ ID NO: 93 - DNA, 1556 bp, Homo sapiens
  ref <308>: DATABASE ACCESSION NUMBER: NM_001801
cggtcagatttgtgtgtgcaccgcgtctccagcgatcccggatccactgcgctgccaggggcctgggggtgggtctcttgctgtctctgcgacgacatccttacgtttcggcactctaatgctgggtttgtgcgtgtgtgtctgcttagcggtctagcgggctgttaggctccctcgcccccagctccttggctcgctcagctcctccaccgcagcccagcagtgagacgcgcgcgcagccagctccccacgagatggaacagaccgaagtgctgaagccacggaccctggctgatctgatccgcatcctgcaccagctctttgccggcgatgaggtcaatgtagaggaggtgcaggccatcatggaagcctacgagagcgaccccatcgagtgggcaatgtacgccaagttcgaccagtacaggtatacccgaaatcttgtggatcaaggaaatggaaaatttaatctgatgattctctgttggggtgaaggacatggcagcagtattcatgatcataccaactcccactgctttctgaagatgctacagggaaatctaaaggagacattatttgcctggcctgacaaaaaatccaatgagatggtcaagaagtctgaaagagtcttgagggaaaaccagtgtgcctacatcaatgattccattggcttacatcgagtagagaacatcagccatacggaacctgctgtgagccttcacttgtacagtccaccttttgatacatgccatgcctttgatcaaagaacaggacataaaaacaaagtcacaatgacattccatagtaaatttggaatcagaactccaaatgcaacttcgggctcgctggagaacaactaaggggcaccaaaccctctgaggttttactttaaggttcgctgtatgtttgccttggacaaaaaggctacctaccacgtgctatccagtaatatacttaaataagccaatacttagatctactgtaaggcagatgctaattataaggcattaagtaagcaaatagtgccctcagctactgcagaagaaaagtcccactgaggaaaagaaagtcttgtgatttttaaaggcaagttttcaagtgctctcatagttctatcctctaattccattaaatccatactaggagcgtcagtgagggttttcatagcttttggaaatactttggtctctgaactgtaattagcaagaagtaaaaacagaaacgtcaaacgtcaaatgtttgctttgttacctggaggactaaatgtagatgtctttagtatactttgtatgttcttaaatattggaagataattttgtgaatctgtagattttattttttcagtcttaccttacaaatttcttttctatgaataatagaggaactcacggcactctgccacttgttaatgaaaggaagtgcagaggatttagaaaagtacatgatccccagaccacaacaaaccaaaacataaactcatgtctgtgtcccatggtcatagtcaaagattttgtactgctaaaattaccaaataatttaaataaagtggatttgaacac

SEQ ID NO: 94 - DNA, 1389 bp, Homo sapiens
  ref <308>: DATABASE ACCESSION NUMBER: NM_001809
cgcggacttctgccaagcaccggctcatgtgaggctcgcggcacagcgttctctgggctccccagaagccagcctttcgctcccggacccggcagcccgagcaggagccgtgggaccgggcgccagcaccctctgcggcgtgtcatgggcccgcgccgccggagccgaaagcccgaggccccgaggaggcgcagcccgagcccgaccccgacccccggcccctcccggcggggcccctccttaggcgcttcctcccatcaacacagtcggcggagacaaggttggctaaaggagatccgaaagcttcagaagagcacacacctcttgataaggaagctgcccttcagccgcctggcaagagaaatatgtgttaaattcactcgtggtgtggacttcaattggcaagcccaggccctattggccctacaagaggcagcagaagcatttctagttcatctctttgaggacgcctatctcctcaccttacatgcaggccgagttactctcttcccaaaggatgtgcaactggcccggaggatccggggccttgaggagggactcggctgagctcctgcacccagtgtttctgtcagtctttcctgctcagccaggggggatgataccggggactctccagagccatgactagatccaatggattctgcgatgctgtctggactttgctgtctctgaacagtatgtgtgtgttgctttaaatatttttcttttttttgagaaggagaagactgcatgactttcctctgtaacagaggtaatatatgagacaatcaacaccgttccaaaggcctgaaaataattttcagataaagagactccaaggttgactttagtttgtgagttactcatgtgactatttgaggattttgaaaacatcagatttgctgtggtatgggagaaaaggttatgtacttattattttagctctttctgtaatatttacattttttaccatatgtacatttgtacttttattttacacataagggaaaaaataagaccactttgagcagttgcctggaaggctgggcatttccatcatatagacctctgcccttcagagtagcctcaccattagtggcagcatcatgtaactgagtggactgtgcttgtcaacggatgtgtagcttttcagaaacttaattggggatgaatagaaaacctgtaagctttgatgttctggttacttctagtaaattcctgtcaaaatcaattcagaaattctaacttggagaatttaacattttactcttgtaaatcatagaagatgtatcataacagttcagaattttaaagtacattttcgatgcttttatgggtatttttgtagtttctttgtagagagataataaaaatcaaaatatttaatga

SEQ ID NO: 95 - DNA, 8257 bp, Homo sapiens
  ref <308>: DATABASE ACCESSION NUMBER: NM_001813
taaatttaaaggcggggcggcctgtgagccctgaagtgccggccgcggagggtcctggccattttggtgggaccagttcagcctgataggatggcggaggaaggagccgtggccgtctgcgtgcgagtgcggccgctgaacagcagagaagaatcacttggagaaactgcccaagtttactggaaaactgacaataatgtcatttatcaagttgatggaagtaaatccttcaattttgatcgtgtctttcatggtaatgaaactaccaaaaatgtgtatgaagaaatagcagcaccaatcatcgattctgccatacaaggctacaatggtactatatttgcctatggacagactgcttcaggaaaaacatataccatgatgggttcagaagatcatttgggagttatacccagggcaattcatgacattttccaaaaaattaagaagtttcctgatagggaatttctcttacgtgtatcttacatggaaatatacaatgaaaccattacagatttactctgtggcactcaaaaaatgaaacctttaattattcgagaagatgtcaataggaatgtgtatgttgctgatctcacagaagaagttgtatatacatcagaaatggctttgaaatggattacaaagggagaaaagagcaggcattatggagaaacaaaaatgaatcaaagaagcagtcgttctcataccatctttaggatgattttggaaagcagagagaagggtgaaccttctaattgtgaaggatctgttaaggtatcccatttgaatttggttgatcttgcaggcagtgaaagagctgctcaaacaggcgctgcaggtgtgcggctcaaggaaggctgtaatataaatcgaagcttatttattttgggacaagtgatcaagaaacttagtgatggacaagttggtggtttcataaattatcgagatagcaagttaacacgaattcttcagaattccttgggaggaaatccaaagacacgtattatctgcacaattactccagtatcttttgatgaaactcttactgctctccagtttgccagtactgctaaatatatgaagaatactccttatgttaatgaggtatcaactgatgaagctctcctgaaaaggtatagaaaagaaataatggatcttaaaaaacaattagaggaggtttctttagagacgcgggctcaggcaatggaaaaagaccaattggcccaacttttggaagaaaaagatttgcttcagaaagtacagaatgagaaaattgaaaacttaacacggatgctggtgacctcttcttccctcacgttgcaacaggaattaaaggctaaaagaaaacgaagagttacttggtgccttggcaaaattaacaaaatgaagaactcaaactatgcagatcaatttaatataccaacaaatataacaacaaaaacacataagctttctataaatttattacgagaaattgatgaatctgtctgttcagagtctgatgttttcagtaacactcttgatacattaagtgagatagaatggaatccagcaacaaagctactaaatcaggagaatatagaaagtgagttgaactcacttcgtgctgactatgataatctggtattagactatgaacaactacgaacagaaaaagaagaaatggaattgaaattaaaagaaaagaatgatttggatgaatttgaggctctagaaagaaaaactaaaaaagatcaagagatgcaactaattcatgaaatttcgaacttaaagaatttagttaagcatcgagaagtatataatcaagatcttgagaatgaactcagttcaaaagtagagctgcttagagaaaaggaagaccagattaagaagctacaggaatacatagactctcaaaagctagaaaatataaaaatggacttgtcatactcattggaaagcattgaagacccaaaacaaatgaagcagactctgtttgatgctgaaactgtagcccttgatgccaagagagaatcagcctttcttagaagtgaaaatctggagttgaaggagaaaatgaaagaacttgcaactacatacaagcaaatggaaaatgatattcagttatatcaaagccaattggaggcaaaaaagaaaatgcaagttgatctggagaaagaattacaatctgcttttaatgagataacaaaactcacctcccttatagatggcaaagttccaaaagatttgctctgtaatttggaattggaaggaaagattactgatcttcagaaagaactaaataaagaagttgaagaaaatgaagctttgcgggaagaagtcattttgctttcagaattgaaatctttaccttctgaagtagaaaggctgaggaaagagatacaagacaaatctgaagagctccatataataacatcagaaaaagataaattgttttctgaagtagttcataaggagagtagagttcaaggtttacttgaagaaattgggaaaacaaaagatgacctagcaactacacagtcgaattataaaagcactgatcaagaattccaaaatttcaaaacccttcatatggactttgagcaaaagtataagatggtccttgaggagaatgagagaatgaatcaggaaatagttaatctctctaaagaagcccaaaaatttgattcgagtttgggtgctttgaagaccgagctttcttacaagacccaagaacttcaggagaaaacacgtgaggttcaagaaagactaaatgagatggaacagctgaaggaacaattagaaaatagagattctccgctgcaaactgtagaaagggagaaaacactgattactgagaaactgcagcaaactttagaagaagtaaaaactttaactcaagaaaaagatgatctaaaacaactccaagaaagcttgcaaattgagagggaccaactcaaaagtgatattcacgatactgttaacatgaatatagatactcaagaacaattacgaaatgctcttgagtctctgaaacaacatcaagaaacaattaatacactaaaatcgaaaatttctgaggaagtttccaggaatttgcatatggaggaaaatacaggagaaactaaagatgaatttcagcaaaagatggttggcatagataaaaaacaggatttggaagctaaaaatacccaaacactaactgcagatgttaaggataatgagataattgagcaacaaaggaagatattttctttaatacaggagaaaaatgaactccaacaaatgttagagagtgttatagcagaaaaggaacaattgaagactgacctaaaggaaaatattgaaatgaccattgaaaaccaggaagaattaagacttcttggggatgaacttaaaaagcaacaagagatagttgcacaagaaaagaaccatgccataaagaaagaaggagagctttctaggacctgtgacagactggcagaagttgaagaaaaactaaaggaaaagagccagcaactccaagaaaaacagcaacaacttcttaatgtacaagaagagatgagtgagatgcagaaaaagattaatgaaatagagaatttaaagaatgaattaaagaacaaagaattgacattggaacatatggaaacagagaggcttgagttggctcagaaacttaatgaaaattatgaggaagtgaaatctataaccaaagaaagaaaagttctaaaggaattacagaagtcatttgaaacagagagagaccaccttagaggatatataagagaaattgaagctacaggcctacaaaccaaagaagaactaaaaattgctcatattcacctaaaagaacaccaagaaactattgatgaactaagaagaagcgtatctgagaagacagctcaaataataaatactcaggacttagaaaaatcccataccaaattacaagaagagatcccagtgcttcatgaggaacaagagttactgcctaatgtgaaaaaagtcagtgagactcaggaaacaatgaatgaactggagttattaacagaacagtccacaaccaaggactcaacaacactggcaagaatagaaatggaaaggctcaggttgaatgaaaaatttcaagaaagtcaggaagagataaaatctctaaccaaggaaagagacaaccttaaaacgataaaagaagcccttgaagttaaacatgaccagctgaaagaacatattagagaaactttggctaaaatccaggagtctcaaagcaaacaagaacagtccttaaatatgaaagaaaaagacaatgaaactaccaaaatcgtgagtgagatggagcaattcaaacccaaagattcagcactactaaggatagaaatagaaatgctcggattgtccaaaagacttcaagaaagtcatgatgaaatgaaatctgtagctaaggagaaagatgacctacagaggctgcaagaagttcttcaatctgaaagtgaccagctcaaagaaaacataaaagaaattgtagctaaacacctggaaactgaagaggaacttaaagttgctcattgttgcctgaaagaacaagaggaaactattaatgagttaagagtgaatctttcagagaaggaaactgaaatatcaaccattcaaaagcagttagaagcaatcaatgataaattacagaacaagatccaagagatttatgagaaagaggaacaacttaatataaaacaaattagtgaggttcaggaaaacgtgaatgaactgaaacaattcaaggagcatcgcaaagccaaggattcagcactacaaagtatagaaagtaagatgctcgagttgaccaacagacttcaagaaagtcaagaagaaatacaaattatgattaaggaaaaagaggaaatgaaaagagtacaggaggcccttcagatagagagagaccaactgaaagaaaacactaaagaaattgtagctaaaatgaaagaatctcaagaaaaagaatatcagtttcttaagatgacagctgtcaatgagactcaggagaaaatgtgtgaaatagaacacttgaaggagcaatttgagacccagaagttaaacctggaaaacatagaaacggagaatataaggttgactcagatactacatgaaaaccttgaagaaatgagatctgtaacaaaagaaagagatgaccttaggagtgtggaggagactctcaaagtagagagagaccagctcaaggaaaaccttagagaaactataactagagacctagaaaaacaagaggagctaaaaattgttcacatgcatctgaaggagcaccaagaaactattgataaactaagagggattgtttcagagaaaacaaatgaaatatcaaatatgcaaaaggacttagaacactcaaatgatgccttaaaagcacaggatctgaaaatacaagaggaactaagaattgctcacatgcatctgaaagagcagcaggaaactattgacaaactcagaggaattgtttctgagaagacagataaactatcaaatatgcaaaaagatttagaaaattcaaatgctaaattacaagaaaagattcaagaacttaaggcaaatgaacatcaacttattacgttaaaaaaagatgtcaatgagacacagaaaaaagtgtctgaaatggagcaactaaagaaacaaataaaagaccaaagcttaactctgagtaaattagaaatagagaatttaaatttggctcaagaacttcatgaaaaccttgaagaaatgaaatctgtaatgaaagaaagagataatctaagaagagtagaggagacactcaaactggagagagaccaactcaaggaaagcctgcaagaaaccaaagctagagatctggaaatacaacaggaactaaaaactgctcgtatgctatcaaaagaacacaaagaaactgttgataaacttagagaaaaaatttcagaaaagacaattcaaatttcagacattcaaaaggatttagataaatcaaaagatgaattacagaaaaagatccaagaacttcagaaaaaagaacttcaactgcttagagtgaaagaagatgtcaatatgagtcataaaaaaattaatgaaatggaacagttgaagaagcaatttgagccaaactatctatgcaagtgtgagatggataacttccagttgactaagaaacttcatgaaagccttgaagaaataagaattgtagctaaagaaagagatgagctaaggaggataaaagaatctctcaaaatggaaagggaccaattcatagcaaccttaagggaaatgatagctagagaccgacagaaccaccaagtaaaacctgaaaaaaggttactaagtgatggacaacagcaccttatggaaagcctgagagaaaagtgctctagaataaaagagcttttgaagagatactcagagatggatgatcattatgagtgcttgaatagattgtctcttgacttggagaaggaaattgaattccacagaatcatgaagaaactgaagtatgtgttaagctatgttacaaaaataaaagaagaacaacatgaatgcatcaataaatttgaaatggattttattgatgaagtggaaaagcaaaaggaattgctaattaaaatacagcaccttcaacaagattgtgatgtaccatccagagaattaagggatctcaaattgaaccagaatatggatctacatattgaggaaattctcaaagatttctcagaaagtgagttccctagcataaagactgaatttcaacaagtactaagtaataggaaagaaatgacacagtttttggaagagtggttaaatactcgttttgatatagaaaagcttaaaaatggcatccagaaagaaaatgataggatttgtcaagtgaataacttctttaataacagaataattgccataatgaatgaatcaacagagtttgaggaaagaagtgctaccatatccaaagagtgggaacaggacctgaaatcactgaaagagaaaaatgaaaaactatttaaaaactaccaaacattgaagacttccttggcatctggtgcccaggttaatcctaccacacaagacaataagaatcctcatgttacatcaagagctacacagttaaccacagagaaaattcgagagctggaaaattcactgcatgaagctaaagaaagtgctatgcataaggaaagcaagattataaagatgcagaaagaacttgaggtgactaatgacataatagcaaaacttcaagccaaagttcatgaatcaaataaatgccttgaaaaaacaaaagagacaattcaagtacttcaggacaaagttgctttaggagctaagccatataaagaagaaattgaagatctcaaaatgaagcttgtgaaaatagacctagagaaaatgaaaaatgccaaagaatttgaaaaggaaatcagtgctacaaaagccactgtagaatatcaaaaggaagttataaggctattgagagaaaatctcagaagaagtcaacaggcccaagatacctcagtgatatcagaacatactgatcctcagccttcaaataaacccttaacttgtggaggtggcagcggcattgtacaaaacacaaaagctcttattttgaaaagtgaacatataaggctagaaaaagaaatttctaagttaaagcagcaaaatgaacagctaataaaacaaaagaatgaattgttaagcaataatcagcatctttccaatgaggtcaaaacttggaaggaaagaacccttaaaagagaggctcacaaacaagtaacttgtgagaattctccaaagtctcctaaagtgactggaacagcttctaaaaagaaacaaattacaccctctcaatgcaaggaacggaatttacaagatcctgtgccaaaggaatcaccaaaatcttgtttttttgatagccgatcaaagtctttaccatcacctcatccagttcgctattttgataactcaagtttaggcctttgtccagaggtgcaaaatgcaggagcagagagtgtggattctcagccaggtccttggcacgcctcctcaggcaaggatgtgcctgagtgcaaaactcagtagactcctctttgtcacttctctggagatccagcattccttatttggaaatgactttgtttatgtgtctatccctggtaatgatgttgtagtgcagcttaatttcaattcagtctttactttgccactagagttgaaagataagggaacaggaaatgaatgcattgtggtaatttag

SEQ ID NO: 96 - DNA, 4562 bp, Homo sapiens
  ref <308>: DATABASE ACCESSION NUMBER: NM_001830
ccgagaggcaaatgagcttgtcagtttctgcctccattagaccctcaacccaaaggagcaggagatttcggtagcgttttaactttatctcagaatctgaaagcggaaggccaggcaagctgcacacatcaagcgaaacgcctgaggggcggccagcgcgagggtttctggccatcgaccctcacctcccgggacttccagggtcttccccccaccccgcgcacacctccctgcctcgccccgagggcgtcacgtggcagcgtggggcccgcctcctggtgatgtcacggcgctcgcagccgtcgcgctgaagaaaggatgctcgaggatgctgtccaggtgggcggccgcgggcgcgatgcggcactgcaggtgtaattagcatggtcaatgcgggagcgatgagtggctctggaaacctgatggatttcctcgatgagccgttccctgatgtggggacgtatgaggacttccacaccatcgactggctaagggaaaagtcacgggacaccgacagacacaggaagatcaccagcaagagcaaggagtccatatgggagttcatcaagagcctgctggatgcctggtcgggatgggtggtgatgctgctcatcggcctgctggcgggcaccttggctggggtcatcgatctcgccgtggactggatgacggacctgaaggagggggtctgcctgtctgccttctggtatagccatgagcagtgttgctggacttctaacgagaccacttttgaggacagagacaagtgtcccctgtggcagaaatggtcggagctgctggtgaatcagtcagagggtgccagtgcttacattctgaattacttaatgtacatcctatgggcgctgctgtttgcatttttggctgtctccctggtgcgtgtatttgcaccatatcgctgtggctctggcataccagagataaagaccattttgagcggctttatcatcaggggctacttggggaagtggaccctgctaatcaagacagtcacgctggtgctggtagtgtcctccggtctgagccttgggaaggaagggccgctagtgcacgtggcttgttgctgtggcaacttcttcagcagccttttctccaagtacagcaagaatgagggcaagaggcgggaggtgctttcagctgcagcggctgctggagtctctgttgcctttggtgcaccaattggaggcgtgcttttcagtctagaagaggtcagttactactttcccctgaagaccttgtggaggtcatttttcgcagccctggtggcggcctttacgctgagatccatcaatccctttgggaatagccgtctcgttctcttttatgtggaataccacacgccctggtacatggctgaactcttccccttcatcctgcttggggtcttcgggggcttgtggggaaccctcttcatccgctgcaacatcgcctggtgcaggaggcgcaagaccaccaggctggggaagtacccggtgctggaggtcattgtggtgactgccatcactgccatcattgcctaccccaatccctacacacgccagagcaccagcgagctcatttctgagctgttcaatgactgtggagcccttgagtcttcccagctctgtgactacatcaatgaccccaacatgactcggcctgtggatgacattccagaccggccggctggtgtcggtgtttacacggccatgtggcagctggccctggcactgatcttcaaaatcgtcgttaccatatttacctttggcatgaagatcccgtcgggcctcttcatccccagcatggctgtgggcgcgatagcgggcaggatggtgggaattggcgtggagcagctggcctaccatcaccatgactggtactacttcaggaactggtgcagacccggtgcagactgtgtcacgccagggctgtacgcaatggtgggagctgcggcctgcctcggtggagttaccaggatgacggtgtcattggtggtcatcatgtttgaattaaccgggggtctggagtacatcgtgcccctgatggcggcggctgtgaccagcaagtgggtagctgatgcatttgggaaagaaggcatctacgaggcccacatccacttaaatgggtaccctttccttgacgtgaaggacgagtttactcaccgcacactggccaccgacgtcatgcggccccggcggggagagccgccactgtcggtgctcacccaggacagcatgactgtcgaggacgtggagacgctcatcaaggagaccgactacaacggcttccccgtggtggtctccagagactccgagcgcctcattggatttgcccagaggagggaactgattctcgcaataaataacgccagacagaggcaggagggcattgtgagcaattccatcatgtacttcacggaggaaccccccgagctgccggccaacagcccacatcccctgaagctgcggcgcatcctgaacctcagcccgtttacagtgacagaccacactccgatggaaacggtggtggatatcttccggaaactggggcttcggcagtgcctggtgacgcggagcgggagacttcttggcatcatcacaaaaaaggatgttctgagacatatggcccagatggcaaaccaggaccccgaatccatcatgtttaattagcaacaaggtggcaattattttcagaaaaacactgactgtgtcatttaaaaagaaataaatgatatgttattatcccaatgaaagatcatgcattggggacagcagaaacaaaagcttttttggaaaggcggggaagaaggatgaaacctttaaaaacaaaaacaaaaacatcaatgagtaggcattttatagctttaaccccgtatgagtttcaagctgtgtttcctaatgagtttgctactgctgtgggggcatgtgggtgggtaaatgatgtaaatgatgtgatctgtacaagtatgtggagcatgaatgctgactcaagaaacttttactccttctgctcaaggctgatgtttgtaacttatgaacacacgtgaagtgttgagtccaaaagacaaaggggcatcggcatgtcagcgtccttatttattggttcttgaagttttgctgctatgttactgaatcatactaaagacatttgcgcttactttgttgaaaaagaaaaagaaattaaatttgaacacagtgaaagctgcaagtatgccagtgggtccgctcacgaccgtcctgtttcttgctcctgttctcagcctgttatctggcttatccatcagtttctgaaccaacatcaggggcacctgccatgatgagtgtgaagaaatcatttctctatgcaagactggcatcctgggactgcacgatgaactattggagcatacagtactgcggtgtgtctcctcccatacaaagggacacatccttattttgagggtatactcacccgatcattgatttgcatccccatggcatttgcttcatttatttattgcttttgcccatgcattcaatattgatcagctcagcacttccatgggccatagccggtatgcccccagcctgccataagcgtgctttcattttcaagtagcatatgcaagagtccaaacaggctacccaatgttactacttatttttcctctcaggtcttatcagatacggctgtggagaggatgaggcatatgcgttgtcagttggaatccctccaaatggattgcaagagaaatactaaattgattctaaatctgttccattatcttctctgtaggatgcaaaacatccagttgtaatgtataagcatgcacttcatactagcaatcacagcacaggaggacagcattaaattttatatagccaatttgggcactgggcatctttgtatttgaacttaacgacacatttactcttttagtcaggatttcggtcttttctgcgggaaggaattaagctatgtattaggtccaccatacgatctgtgtaagtaagattatcccacttgccctttctctttagtctttgtcccttccttttcactaagtgcccctcatccttttcaatctcattgtcactggatagtgctgtatcacttaggtgtgcattcggctgcaaataacagaaaacccagcaaacactgaagggctggataagaaccctgagagggggtactccaggactgtctccataacatcattgggatccccatcccgttgctatttctttttcaccgtttttaccttttgtcctctggcttattgcctcagagttgcaagatggttcctgaactgtcaggtatcatgtctgctttctaagtgggaagaggaagggagaggcaagcaactaggtacaatgtctatcaggaaagcaaagcttccccagagacgctcagcttgtatccattgactggaagtctgtcacgtggctccccctagccgcacactagtgtgggaaggaaaatattgagctaggcacattactctctgaacgaaattcatattatcttattaaggaagagtgttggtcttcaggaggggaagtttgctgtattggatgccatcatcg

SEQ ID NO: 97 - DNA, 1191 bp, Homo sapiens
  ref <308>: DATABASE ACCESSION NUMBER: NM_002001
agtctccagcatcctccacctgtctaccaccgagcatgggcctatatttgaagccttagatctctccagcacagtaagcaccaggagtccatgaagaagatggctcctgccatggaatcccctactctactgtgtgtagccttactgttcttcgctccagatggcgtgttagcagtccctcagaaacctaaggtctccttgaaccctccatggaatagaatatttaaaggagagaatgtgactcttacatgtaatgggaacaatttctttgaagtcagttccaccaaatggttccacaatggcagcctttcagaagagacaaattcaagtttgaatattgtgaatgccaaatttgaagacagtggagaatacaaatgtcagcaccaacaagttaatgagagtgaacctgtgtacctggaagtcttcagtgactggctgctccttcaggcctctgctgaggtggtgatggagggccagcccctcttcctcaggtgccatggttggaggaactgggatgtgtacaaggtgatctattataaggatggtgaagctctcaagtactggtatgagaaccacaacatctccattacaaatgccacagttgaagacagtggaacctactactgtacgggcaaagtgtggcagctggactatgagtctgagcccctcaacattactgtaataaaagctccgcgtgagaagtactggctacaattttttatcccattgttggtggtgattctgtttgctgtggacacaggattatttatctcaactcagcagcaggtcacatttctcttgaagattaagagaaccaggaaaggcttcagacttctgaacccacatcctaagccaaaccccaaaaacaactgatataattactcaagaaatatttgcaacattagtttttttccagcatcagcaattgctactcaattgtcaaacacagcttgcaatatacatagaaacgtctgtgctcaaggatttatagaaatgcttcattaaactgagtgaaactggttaagtggcatgtaatagtaagtgctcaattaacattggttgaataaatgagagaatgaatagattcatttattagcatttgtaaaagagatgttcaatttcaataaaataaatataaaaccatgtaacagaatgcttctgagtaaaaaaaaaaaaaaaaaaaaaaaaaaa

SEQ ID NO: 98 - DNA, 1559 bp, Homo sapiens
  ref <308>: DATABASE ACCESSION NUMBER: NM_002036
gggcctgaaccaaacggtgccatggggaactgtctgcacagggtgagtatggggccaggccccagagtcccttatccctatgcccctcatttcccctgctgtttgcccctcagtctttatatctcttccttttcctcctcatcttttctcccttcccgcttttttcctcttccttcaaagtctttttccttctctccttcctatgctagcctcctagctccctcttgtgtccctccctttgcctttgagtcagttccatcctggtctcttggtgcctttccttctgaccttgcactgctcctccagccccagctgccctggcttccccaggactgttcctgctccggctcttcaggctccctgctttgtccttttccactgtccgcactgcatctgactcctgcagagaccttgttctcccacccgaccttcctctctgtcctcccctcccacctgcccctcaattcccaggagactcttccggtgtaactctgatggcctcctctgggtatgtcctccaggcggagctctccccctcaactgagaactcaagtcagctggacttcgaagatgtatggaattcttcctatggtgtgaatgattccttcccagatggagactatgatgccaacctggaagcagctgccccctgccactcctgtaacctgctggatgactctgcactgcccttcttcatcctcaccagtgtcctgggtatcctagctagcagcactgtcctcttcatgcttttcagacctctcttccgctggcagctctgccctggctggcctgtcctggcacagctggctgtgggcagtgccctcttcagcattgtggtgcccgtcttggccccagggctaggtagcactcgcagctctgccctgtgtagcctgggctactgtgtctggtatggctcagcctttgcccaggctttgctgctagggtgccatgcctccctgggccacagactgggtgcaggccaggtcccaggcctcaccctggggctcactgtgggaatttggggagtggctgccctactgacactgcctgtcaccctggccagtggtgcttctggtggactctgcaccctgatatacagcacggagctgaaggctttgcaggccacacacactgtagcctgtcttgccatctttgtcttgttgccattgggtttgtttggagccaaggggctgaagaaggcattgggtatggggccaggcccctggatgaatatcctgtgggcctggtttattttctggtggcctcatggggtggttctaggactggatttcctggtgaggtccaagctgttgctgttgtcaacatgtctggcccagcaggctctggacctgctgctgaacctggcagaagccctggcaattttgcactgtgtggctacgcccctgctcctcgccctattctgccaccaggccacccgcaccctcttgccctctctgcccctccctgaaggatggtcttctcatctggacacccttggaagcaaatcctagttctcttcccacctgtcaacctgaattaaagtctacactgcctttgtg

SEQ ID NO: 99 - DNA, 1075 bp, Homo sapiens
  ref <308>: DATABASE ACCESSION NUMBER: NM_002101
gagcccctcccctcggcccgcgcgggaggagtgtgacccaggtgccgcttcctctcgccgccgagggtcaggagcccgggagcgcgaccctcccccggcccggcctggcccggcctggccagtccccgcggtctctgcccgggctgacgcccaggaatgtggtcgacgagaagccccaacagcacggcgtggcctctcagcctcgagcctgatccggggatggcctctgcctccaccacaatgcatactaccaccattgcagagcctgatccagggatgtctggatggccggatggcagaatggagacctccacccccaccataatggacattgtcgtcattgcaggtgtgattgctgctgtggccatcgtcctagtctccctcctcttcgtcatgctgcgctacatgtaccggcacaagggcacgtaccacaccaatgaggccaagggcacggagtttgctgagagtgcagatgcagccctgcagggagaccctgccctccaagatgctggtgatagcagcagaaaggagtactttatttgagggacaacagacttcacttccctgaatgcctcccccatctccatcaggaaaaatacaccccatcgcccagcacccctgctgataccaccagacagagagagagagcacttgattcttcccgagatagccacctggaaacactaggtgcctgcccagggaggaacggaggaggactcgcgctacaagaggccactcccagggacccagggaggcgatggccaccccagaggccaccttttgctccacggaggtgggagaaaatctgggcacatggggccccctgggcagtgcaggacaacatcagctcactggcaggaaagtccttgttgagggtgagggggtgctggggtacccgggggctggggaagcaaggaaataagtcatctgtatgctgactggggataatggcatcaaatgtcagtccttgacatttggggggaacagcaggtgccagagctaaaaggtacctttgtctgccattgatccagctcagaacgattggaaataaatttgaaatgtaaccgagcaaaaa

SEQ ID NO: 100 - DNA, 1171 bp, Homo sapiens
  ref <308>: DATABASE ACCESSION NUMBER: NM_002125
ccagcatggtgtgtctgaagctccctggaggttcctacatggcaaagctgacagtgacactgatggtgctgagctccccactggctttggctggggacacccgaccacgtttcttgcagcaggataagtatgagtgtcatttcttcaacgggacggagcgggtgcggttcctgcacagagacatctataaccaagaggaggacttgcgcttcgacagcgacgtgggggagtaccgggcggtgacggagctggggcggcctgacgctgagtactggaacagccagaaggacttcctggaagacaggcgcgccgcggtggacacctactgcagacacaactacggggttggtgagagcttcacagtgcagcggcgagttgagcctaaggtgactgtgtatcctgcaaggacccagaccctgcagcaccacaacctcctggtctgctctgtgaatggtttctatccaggcagcattgaagtcaggtggttccggaacagccaggaagagaaggctggggtggtgtccacaggcctgattcagaatggagactggaccttccagaccctggtgatgctggaaacagttcctcgaagtggagaggtttacacctgccaagtggagcacccaagcgtgacgagccctctcacagtggaatggagagcacagtctgaatctgcacagagcaagatgctgagtggagtcgggggctttgtgctgggcctgctcttccttggggccgggctattcatctacttcaagaatcagaaagggcactctggacttcacccaacaggactcgtgagctgaagtgcagatgaccacattcaagggggaaccttctgccccagctttgcatgatgaaaagctttcctgcttggctcttattcttccacaagagaggactttctcaggccctggttgctaccggttcagcaactctgcagaaaatgtccatccttgtggcttcctcagctcctgcccttggcctgaagtcccagcattgatggcagtgcctcatcttcaactttagtgctcccctttacctaaccctacggcctcccatgcatctgtactccccctgtgtgccacaaatgcactacgttattaaatttttctgaagcccagagttaaaaatcatctgtccacctggctccaaagacaaaaaataaaaa

SEQ ID NO: 101 - DNA, 1903 bp, Homo sapiens
  ref <308>: DATABASE ACCESSION NUMBER: NM_002142
agttgttacatgaaatctgcagtttcataatttccgtgggtcgggccgggcgggccaggcgctgggcacggtgatggccaccactggggccctgggcaactactacgtggactcgttcctgctgggcgccgacgccgcggatgagctgagcgttggccgctatgcgccggggaccctgggccagcctccccggcaggcggcgacgctggccgagcaccccgacttcagcccgtgcagcttccagtccaaggcgacggtgtttggcgcctcgtggaacccagtgcacgcggcgggcgccaacgctgtacccgctgcggtgtaccaccaccatcaccaccacccctacgtgcacccccaggcgcccgtggcggcggcggcgccggacggcagttgatagagaaaaacaacccagcgaaggcgccttctctgaaaacaatgctgagaatgagagcggcggagacaagccccccatcgatcccaataacccagcagccaactggcttcatgcgcgctccactcggaaaaagcggtgcccctatacaaaacaccagaccctggaactggagaaagagtttctgttcaacatgtacctcaccagggaccgcaggtacgaggtggctcgactgctcaacctcaccgagaggcaggtcaagatctggttccagaaccgcaggatgaaaatgaagaaaatcaacaaagaccgagcaaaagacgagtgatgccatttgggcttatttagaaaaaagggtaagctagagagaaaaagaaagaactgtccgtcccccttccgccttctcccttttctcacccccaccctagcctccaccatccccgcacaaagcggctctaaacctcaggccacatcttttccaaggcaaaccctgttcaggctggctcgtaggcctgccgctttgatggaggaggtattgtaagctttccattttctataagaaaaaggaaaagttgaggggggggcattagtgctgatagctgtgtgtgttagcttgtatatatatttttaaaaatctacctgttcctgacttaaaacaaaaggaaagaaactacctttttataatgcacaactgttgatggtaggctgtatagtttttagtctgtgtagttaatttaatttgcagtttgtgcggcagattgctctgccaagatacttgaacactgtgttttattgtggtaattatgttttgtgattcaaacttctgtgtactgggtgatgcacccattgtgattgtggaagatagaattcaatttgaactcaggttgtttatgaggggaaaaaaacagttgcatagagtatagctctgtagtggaatatgtcttctgtataactaggctgttaacctatgattgtaaagtagctgtaagaatttcccagtgaaataaaaaaaaattttaagtgttctcggggatgcatagattcatcattttctccaccttaaaaatgcgggcatttaagtctgtccattatctatatagtcctgtcttgtctattgtatatataatctatatgattaaagaaaatatgcataatcagacaagcttgaatattgtttttgcaccagacgaacagtgaggaaattcggagctatacatatgtgcagaaggttactacctagggtttatgcttaattttaattggaggaaatgaatgctgattgtaacggagttaattttattgataataaattatacactatgaaaccgccattgggctactgtagatttgtatccttgatgaatctggggtttccatcagactgaacttacactgtatattttgcaatagttacctcaaggcctactgaccaaattgttgtgttgagatgatatttaactttttgccaaataaaatatattgattcttttctaaaaaaaaaaaaaaaaaaaa

SEQ ID NO: 102 - DNA, 1390 bp, Homo sapiens
  ref <308>: DATABASE ACCESSION NUMBER: NM_002358
gggaagtgctgttggagccgctgtggttgctgtccgcggagtggaagcgcgtgcttttgtttgtgtccctggccatggcgctgcagctctcccgggagcagggaatcaccctgcgcgggagcgccgaaatcgtggccgagttcttctcattcggcatcaacagcattttatatcagcgtggcatatatccatctgaaacctttactcgagtgcagaaatacggactcaccttgcttgtaactactgatcttgagctcataaaatacctaaataatgtggtggaacaactgaaagattggttatacaagtgttcagttcagaaactggttgtagttatctcaaatattgaaagtggtgaggtcctggaaagatggcagtttgatattgagtgtgacaagactgcaaaagatgacagtgcacccagagaaaagtctcagaaagctatccaggatgaaatccgttcagtgatcagacagatcacagctacggtgacatttctgccactgttggaagtttcttgttcatttgatctgctgatttatacagacaaagatttggttgtacctgaaaaatgggaagagtcgggaccacagtttattaccaattctgaggaagtccgccttcgttcatttactactacaatccacaaagtaaatagcatggtggcctacaaaattcctgtcaatgactgaggatgacatgaggaaaataatgtaattgtaattttgaaatgtggttttcctgaaatcaggtcatctatagttgatatgttttatttcattggttaatttttacatggagaaaaccaaaatgatacttactgaactgtgtgtaattgttcctttatttttttggtacctatttgacttaccatggagttaacatcatgaatttattgcacattgttcaaaaggaaccaggaggtttttttgtcaacattgtgatgtatattcctttgaagatagtaactgtagatggaaaaacttgtgctataaagctagatgctttcctaaatcagatgttttggtcaagtagtttgactcagtataggtagggagatatttaagtataaaatacaacaaaggaagtctaaatattcagaatctttgttaaggtcctgaaagtaactcataatctataaacaatgaaatattgctgtatagctccttttgaccttcatttcatgtatagttttccctattgaatcagtttccaattatttgactttaatttatgtaacttgaacctatgaagcaatggatatttgtactgtttaatgttctgtgatacagaactcttaaaaatgttttttcatgtgttttataaaatcaagttttaagtgaaagtgaggaaataaagttaagtttgttttaaaaaaaaaaaaaaaaaa

SEQ ID NO: 103 - DNA, 2040 bp, Homo sapiens
  ref <308>: DATABASE ACCESSION NUMBER: NM_002405
ccatggctcagcctctgggtccagagcctcagctcctacctcttccctccttgccagcccctgatgcctgccagacttttgcctctgctggagcccctgcctgaccagcttcccctccctgtctggttgggatttgggggctgagctgtctggggtcccagggccaaccaatgcagtgccggctcccgcggggcctggctggagccctcctcaccctcctgtgcatggggctcctgtgtctgcggtaccacttgaacctgtccccgcagcgggtacaagggacccccgagctgagccagccgaacccggggccccctaagctacagctacacgatgtcttcattgcagtgaagacgacccgggctttccaccgcttgcgcctggagctgctgcttgacacgtgggtttccaggaccagggaacagacatttgtcttcaccgacagcccagacaaaggcctccaggagagactggggtcccaccttgtggtcaccaactgctccgcggaacacagccacccagctctgtcctgcaagatggctgctgagttcgacaccttcttggccagtgggcttaggtggttctgccatgtggacgatgacaactatgtgaacccaagggcgctgctgcagcttctgagagccttcccgctggcccgcgacgtctatgtgggaaggcccagcctgaaccggcccatccatgcctcagagccacagccccacaaccgcacgaggctggtacagttctggtttgccactgggggtgctggcttctgcatcaatcgcaaactggctttgaagatggctccgtgggccagtggctcccgtttcatggacacatctgctctcatccggctgcctgatgactgcaccatgggctatatcattgagtgcaagctgggcggccgcctgcagcccagccccctctttcactcccacctggagaccctgcagctgctgaggactgcacagctcccagaacaggtcaccctcagctacggtgtctttgaggggaaactcaacgtcattaagctacagggccccttctccccggaggaggacccctccagatttcgctccctccattgtctgctctatccagatacaccctggtgtccccagctgggtgcccgatgaatcctgaactgctgggcaaaggttgggcagagacttctgggtgtgccttggctcccaaggtggcactgtgggtccctggcaagtgtcttgtgataggcagtccctggcagggccttcgggtggttggcaagcccaggatctgagtggcaattggcactgaaggcaccccaggcccctgggaggtgagttagacagcccaggggaccaggtggaccaggtggtggccagagaggctccaggggctagactccctcaggaggctgaattgaaaaagggcagggggcacttgagctgggctggggctcaggggtcctaaccctttaggcagtgacatggcctctgggtggggtctggccgttggccctggctaatgtctctcagtcattcccctggggctcaagcgctgggccgcccactcctgcctccctcatctgtgtcccgagttcctgaagggacatgggtggaatgatggcagaatccagggtctgcagcacctgctgttgttgccaaccagtctcccaaagctccttgctccccaccccttgcgaacaggaccagattttgtttggagcctcagcatgccggggcccagatgatggagcataacgggtcccagccaattgtgatgatcctttttgctcatttcccagcctttcttgctgttaggggctaccatgggaccagctctggccagagggaactaagcaaatccaatagagatgtttctggggaaggttttgcagcccactccccatcttcctgctataaatgtgggtgtgatggctggatctggggcagccaccttgctaccatgaaggaaaggccaagacaatcatccacagctattccctccagcatctggttctgtacaaaaattaaatgcttatttgtttaagtcaaaaaa

SEQ ID NO: 104 - DNA, 3530 bp, Homo sapiens
  ref <308>: DATABASE ACCESSION NUMBER: NM_002428
gcgaggatccggcgtgcagtgttccgagctgggctgggcgccgagagcatgggcagcgacccgagcgcgcccggacggccgggctggacgggcagcctcctcggcgaccgggaggaggcggcgcggccgcgactgctgccgctgctcctggtgcttctgggctgcctgggccttggcgtagcggccgaagacgcggaggtccatgccgagaactggctgcggctttatggctacctgcctcagcccagccgccatatgtccaccatgcgttccgcccagatcttggcctcggcccttgcagagatgcagcgcttctacgggatcccagtcaccggtgtgctcgacgaagagaccaaggagtggatgaagcggccccgctgtggggtgccagaccagttcggggtacgagtgaaagccaacctgcggcggcgtcggaagcgctacgccctcaccgggaggaagtggaacaaccaccatctgacctttagcatccagaactacacggagaagttgggctggtaccactcgatggaggcggtgcgcagggccttccgcgtgtgggagcaggccacgcccctggtcttccaggaggtgccctatgaggacatccggctgcggcgacagaaggaggccgacatcatggtactctttgcctctggcttccacggcgacagctcgccgtttgatggcaccggtggctttctggcccacgcctatttccctggccccggcctaggcggggacacccattttgacgcagatgagccctggaccttctccagcactgacctgcatggaaacaacctcttcctggtggcagtgcatgagctgggccacgcgctggggctggagcactccagcaaccccaatgccatcatggcgccgttctaccagtggaaggacgttgacaacttcaagctgcccgaggacgatctccgtggcatccagcagctctacggtaccccagacggtcagccacagcctacccagcctctccccactgtgacgccacggcggccaggccggcctgaccaccggccgccccggcctccccagccaccacccccaggtgggaagccagagcggcccccaaagccgggccccccagtccagccccgagccacagagcggcccgaccagtatggccccaacatctgcgacggggactttgacacagtggccatgcttcgcggggagatgttcgtgttcaagggccgctggttctggcgagtccggcacaaccgcgtcctggacaactatcccatgcccatcgggcacttctggcgtggtctgcccggtgacatcagtgctgcctacgagcgccaagacggtcgttttgtctttttcaaaggtgaccgctactggctctttcgagaagcgaacctggagcccggctacccacagccgctgaccagctatggcctgggcatcccctatgaccgcattgacacggccatctggtgggagcccacaggccacaccttcttcttccaagaggacaggtactggcgcttcaacgaggagacacagcgtggagaccctgggtaccccaagcccatcagtgtctggcaggggatccctgcctcccctaaaggggccttcctgagcaatgacgcagcctacacctacttctacaagggcaccaaatactggaaattcgacaatgagcgcctgcggatggagcccggctaccccaagtccatcctgcgggacttcatgggctgccaggagcacgtggagccaggcccccgatggcccgacgtggcccggccgcccttcaacccccacgggggtgcagagcccggggcggacagcgcagagggcgacgtgggggatggggatggggactttggggccggggtcaacaaggacgggggcagccgcgtggtggtgcagatggaggaggtggcacggacggtgaacgtggtgatggtgctggtgccactgctgctgctgctctgcgtcctgggcctcacctacgcgctggtgcagatgcagcgcaagggtgcgccacgtgtcctgctttactgcaagcgctcgctgcaggagtgggtctgaccacccagcgctcctgctaacggtgctcagggggcgcctgtggttctgagatggctcccaggggctccctccgcccccaggtaggggcccctctcagccctcacacaccctgtctgccccgccctcattatttatgtccaggtgtttgttttgttttgtttttggcaccttacttgaccatttgtttctgtttccccgactggggcagggtgtttagaattttctaaatgtagttctgctccagacagggaattaggcccccatcatcctctggcttggccacagccaggggagcagaggggcagaggcccacattggaagagcagcacctcctcagcctgaaccccagggctgtaactgccaggctctctttgcccagttggagactgtctggcccccctggtcccctccttcccaagtgagtctctctgggccttaggaagagccttccacccaggggcagccccaggccaaaggggacctggaagggaggtgggccgtggcccttgagtccccattgaggcttggttccttcccaatccagtggacttcgcagtccacttctgacagcctcagtgaccctggctccttgtgccagagaacccagcccacccccggcagcagcccccagctcccacctccccttgggcccacaccttcttccctctctggagaaagggccctgggcctgcctcaccacggaccaaagggagtctgccagggcccctctccccagggaagcagcagcctcgcccctggcagagatgcctccctgagctagaaccctctgttccttccctgtgcctcctccctccctcccgactcacaccactagcctcaggggtctgagctccagctcctttgggcttcagctgccagtgtcctgagccccagggagagggggctggtgggtgcctaggcctgggcagtggatggccgtgaatgggtgcccacagtgtcaggcactgggcatgaggggttcctcccctccagctccctgtgcccccagggtcctgggaggagagacactggtggggataggccagccgcgcatcagactgtgaaccccacgaaggagcccattgtggcctaagaggctgccctcctgtgctcagccctgaggacagatgcctccttcctcttttccttcccaaagcaagcaagaggccgtggctgctgtgggaaatggtactgtacagctggctctacttccccatggccctgagcgagtggagtctgccacccaggatccccaaggcacttgagggggaaggattctgctggcctctgcgagtggtttcttgtgcactggcaccaagtgcgggtccggcagcttctgccccctgcagaaccggagagccagctaaggggtggggctgcgggggttccgtgtccacccccatacatttatttctgtaaataatgtgcactgaataaattgtacagccggcaaaaaaaaaaaaaaaaaaaaa

SEQ ID NO: 105 - DNA, 2731 bp, Homo sapiens
  ref <308>: DATABASE ACCESSION NUMBER: NM_002466
gcgcttggcgggagatagaaaagtgcttcaacccgcgccggcggcgactgcagttcctgcgagcgaggagcgcgggacctgctgacacgctgacgccttcgagcgcggcccggggcccggagcggccggagcagcccgggtcctgaccccggcccggctcccgctccgggctctgccggcgggcgggcgagcgcggcgcggtccgggccggggggatgtctcggcggacgcgctgcgaggatctggatgagctgcactaccaggacacagattcagatgtgccggagcagagggatagcaagtgcaaggtcaaatggacccatgaggaggacgagcagctgagggccctggtgaggcagtttggacagcaggactggaagttcctggccagccacttccctaaccgcactgaccagcaatgccagtacaggtggctgagagttttgaatccagaccttgtcaaggggccatggaccaaagaggaagaccaaaaagtcatcgagctggttaagaagtatggcacaaagcagtggacactgattgccaagcacctgaagggccggctggggaagcagtgccgtgaacgctggcacaaccacctcaaccctgaggtgaagaagtcttgctggaccgaggaggaggaccgcatcatctgcgaggcccacaaggtgctgggcaaccgctgggccgagatcgccaagatgttgccagggaggacagacaatgctgtgaagaatcactggaactctaccatcaaaaggaaggtggacacaggaggcttcttgagcgagtccaaagactgcaagcccccagtgtacttgctgctggagctcgaggacaaggacggcctccagagtgcccagcccacggaaggccagggaagtcttctgaccaactggccctccgtccctcctaccataaaggaggaggaaaacagtgaggaggaacttgcagcagccaccacatcgaaggaacaggagcccatcggtacagatctggacgcagtgcgaacaccagagcccttggaggaattcccgaagcgtgaggaccaggaaggctccccaccagaaacgagcctgccttacaagtgggtggtggaggcagctaacctcctcatccccgctgtgggttctagcctctctgaagccctggacttgatcgagtcggaccctgatgcttggtgtgacctgagtaaatttgacctccctgaggaaccatctgcagaggacagtatcaacaacagcctagtgcagctgcaagcgtcacatcagcagcaagtcctgccaccccgccagccttccgccctggtgcccagtgtgaccgagtaccgcctggatggccacaccatctcagacctgagccggagcagccggggcgagctgatccccatctcccccagcactgaagtcgggggctctggcattggcacaccgccctctgtgctcaagcggcagaggaagaggcgtgtggctctgtcccctgtcactgagaatagcaccagtctgtccttcctggattcctgtaacagcctcacgcccaagagcacacctgttaagaccctgcccttctcgccctcccagtttctgaacttctggaacaaacaggacacattggagctggagagcccctcgctgacatccaccccagtgtgcagccagaaggtggtggtcaccacaccactgcaccgggacaagacacccctgcaccagaaacatgctgcgtttgtaaccccagatcagaagtactccatggacaacactccccacacgccaaccccgttcaagaacgccctggagaagtacggacccctgaagcccctgccacagaccccgcacctggaggaggacttgaaggaggtgctgcgttctgaggctggcatcgaactcatcatcgaggacgacatcaggcccgagaagcagaagaggaagcctgggctgcggcggagccccatcaagaaagtccggaagtctctggctcttgacattgtggatgaggatgtgaagctgatgatgtccacactgcccaagtctctatccttgccgacaactgccccttcaaactcttccagcctcaccctgtcaggtatcaaagaagacaacagcttgctcaaccagggcttcttgcaggccaagcccgagaaggcagcagtggcccagaagccccgaagccacttcacgacacctgcccctatgtccagtgcctggaagacggtggcctgcggggggaccagggaccagcttttcatgcaggagaaagcccggcagctcctgggccgcctgaagcccagccacacatctcggaccctcatcttgtcctgaggtgttgagggtgtcacgagcccattctcatgtttacaggggttgtgggggcagagggggtctgtgaatctgagagtcattcaggtgacctcctgcagggagccttctgccaccagcccctccccagactctcaggtggaggcaacagggccatgtgctgccctgttgccgagcccagctgtgggcggctcctggtgctaacaacaaagttccacttccaggtctgcctggttccctccccaaggccacagggagctccgtcagcttctcccaagcccacgtcaggcctggcctcatctcagaccctgcttaggatgggggatgtggccaggggtgctcctgtgctcaccctctcttggtgcatttttttggaagaataaaattgcctctctcttaaaaaaaaaaaaaaaaaa

SEQ ID NO: 106 - DNA, 661 bp, Homo sapiens
  ref <308>: DATABASE ACCESSION NUMBER: NM_002624
agagacttcctcttcgttaagtcggccttcccaacatggcgcagtctattaacatcacggagctgaatctgccgcagctagaaatgctcaagaaccagctggaccaggaagtggagttcttgtccacgtccattgctcagctcaaagtggtacagaccaagtatgtggaagccaaggactgtctgaacgtgctgaacaagagcaacgaggggaaagaattactcgtcccactgacgagttctatgtatgtccctgggaagctgcatgatgtggaacacgtgctcatcgatgtgggaactgggtactatgtagagaagacagctgaggatgccaaggacttcttcaagaggaagatagattttctaaccaagcagatggagaaaatccaaccagctcttcaggagaagcacgccatgaaacaggccgtcatggaaatgatgagtcagaagattcagcagctcacagccctgggggcagctcaggctactgctaaggcctgagagtttttgcagaaatggggcagagggacaccctttgggcgtggcttcctggtgatgggaagggtcttgtgttttaatgccaataaatgtgccagctgggcagaaaaaaaaaaaaaaaaaaaaaaaaaaaaaaaaaaaaaaaaaaaaaaaaaaaaaaaaaa

SEQ ID NO: 107 - DNA, 6331 bp, Homo sapiens
  ref <308>: DATABASE ACCESSION NUMBER: NM_002837
gtctcctctggatcttaactactgagcgcaatgctgagccatggagccgggttggccttgtggatcacactgagcctgctgcagactggactggcggagccagagagatgtaacttcaccctggcggagtccaaggcctccagccattctgtgtctatccagtggagaattttgggctcaccctgtaactttagcctcatctatagcagtgacaccctgggggccgcgttgtgccctacctttcggatagacaacaccacatacggatgtaaccttcaagatttacaagcaggaaccatctataacttcaagattatttctctggatgaagagagaactgtggtcttgcaaacagatcctttacctcctgctaggtttggagtcagtaaagagaagacgacttcaaccggcttgcatgtttggtggactccttcttccggaaaagtcacctcatatgaggtgcaattatttgatgaaaataaccaaaagatacagggggttcaaattcaagaaagtacttcatggaatgaatacacttttttcaatctcactgctggtagtaaatacaatattgccatcacagctgtttctggaggaaaacgttctttttcagtttataccaatggatcaacagtgccatctccagtgaaagatattggtatttccacaaaagccaattctctcctgatttcctggtcccatggttctgggaatgtggaacgataccggctgatgctaatggataaagggatcctagttcatggcggtgttgtggacaaacatgctacttcctatgcttttcacgggctgtcccctggctacctctacaacctcactgttatgactgaggctgcagggctgcaaaactacaggtggaaactagtcaggacagcccccatggaagtctcaaatctgaaggtgacaaatgatggcagtttgacctctctaaaagtcaaatggcaaagacctcctggaaatgtggattcttacaatatcaccctgtctcacaaagggaccatcaaggaatccagagtattagcaccttggattactgaaactcactttaaagagttagtccccggtcgactttatcaagttactgtcagctgtgtctctggtgaactgtctgctcagaagatggcagtgggcagaacatttccagacaaagttgcaaacctggaggcaaacaataatggcaggatgaggtctcttgtagtgagctggtcgccccctgctggagactgggagcagtatcggatcctactcttcaatgattctgtggtgctgctcaacatcactgtgggaaaggaagaaacacagtatgtcatggatgacacggggctcgtaccgggaagacagtatgaggtggaagtcattgttgagagtggaaatttgaagaattctgagcgttgccaaggcaggacagtccccctggctgtcctccagcttcgtgtcaaacatgccaatgaaacctcactgagtatcatgtggcagacccctgtagcagaatgggagaaatacatcatttccctagctgacagagacctcttactgatccacaagtcactctccaaagatgccaaagaattcacttttactgacctggtgcctggacgaaaatacatggctacagtcaccagtattagtggagacttaaaaaattcctcttcagtaaaaggaagaacagtgcctgcccaagtgactgacttgcatgtggccaaccaaggaatgaccagtagtctgtttactaactggacccaggcacaaggagacgtagaattttaccaagtcttactgatccatgaaaatgtggtcattaaaaatgaaagcatctccagtgagaccagcagatacagcttccactctctcaagtccggcagcctgtactccgtggtggtaacaacagtgagtggagggatctcttcccgacaagtggttgtggagggaagaacagtcccttccagtgtgagtggagtaacggtgaacaattccggtcgtaatgactacctcagcgtttcctggctgctggcgcccggagatgtggataactatgaggtaacattgtctcatgacggcaaggtggttcagtcccttgtcattgccaagtctgtcagagaatgttccttcagctccctcaccccaggccgcctctacaccgtgaccataactacaaggagtggcaagtatgaaaatcactccttcagccaagagcggacagtgcctgacaaagtccagggagtcagtgttagcaactcagccaggagtgactatttaagggtatcctgggtgcatgccactggagactttgatcactatgaagtcaccattaaaaacaaaaacaacttcattcaaactaaaagcattcccaagtcagaaaacgaatgtgtatttgttcagctagtccctggacggttgtacagtgtcactgttactacaaaaagtggacaatatgaagccaatgaacaagggaatgggagaacaattccagagcctgttaaggatctaacattgcgcaacaggagcactgaggacttgcatgtgacttggtcaggagctaatggggatgtcgaccaatatgagatccagctgctcttcaatgacatgaaagtatttcctccttttcaccttgtaaataccgcaaccgagtatcgatttacttccctaacaccaggccgccaatacaaaattcttgtcttgacgattagcggggatgtacagcagtcagccttcattgagggcttcacagttcctagtgctgtcaaaaatattcacatttctcccaatggagcaacagatagcctgacggtgaactggactcctggtgggggagacgttgattcctacacggtgtcggcattcaggcacagtcaaaaggttgactctcagactattcccaagcacgtctttgagcacacgttccacagactggaggccggggagcagtaccagatcatgattgcctcagtcagcgggtccctgaagaatcagataaatgtggttgggcggacagttccagcatctgtccaaggagtaattgcagacaatgcatacagcagttattccttaatagtaagttggcaaaaagctgctggtgtggcagaaagatatgatatcctgcttctaactgaaaatggaatccttctgcgcaacacatcagagccagccaccactaagcaacacaaatttgaagatctaacaccaggcaagaaatacaagatacagatcctaactgtcagtggaggcctctttagcaaggaagcccagactgaaggccgaacagtcccagcagctgtcaccgacctgaggatcacagagaactccaccaggcacctgtccttccgctggaccgcctcagagggggagctcagctggtacaacatctttttgtacaacccagatgggaatctccaggagagagctcaagttgacccactagtccagagcttctctttccagaacttgctacaaggcagaatgtacaagatggtgattgtaactcacagtggggagctgtctaatgagtctttcatatttggtagaacagtcccagcctctgtgagtcatctcagggggtccaatcggaacacgacagacagcctttggttcaactggagtccagcctctggggactttgacttttatgagctgattctctataatcccaatggcacaaagaaggaaaactggaaagacaaggacctgacggagtggcggtttcaaggccttgttcctggaaggaagtacgtgctgtgggtggtaactcacagtggagatctcagcaataaagtcacagcggagagcagaacagctccaagtcctcccagtcttatgtcatttgctgacattgcaaacacatccttggccatcacgtggaaagggcccccagactggacagactacaacgactttgagctgcagtggttgcccagagatgcacttactgtcttcaacccctacaacaacagaaaatcagaaggacgcattgtgtatggtcttcgtccagggagatcctatcaattcaacgtcaagactgtcagtggtgattcctggaaaacttacagcaaaccaatttttggatctgtgaggacaaagcctgacaagatacaaaacctgcattgccggcctcagaactccacggccattgcctgttcttggatccctcctgattctgactttgatggttatagtattgaatgccggaaaatggacacccaagaagttgagttttccagaaagctggagaaagaaaaatctctgctcaacatcatgatgctagtgccccataagaggtacctggtgtccatcaaagtgcagtcggccggcatgaccagcgaggtggttgaagacagcactatcacaatgatagaccgcccccctcctccacccccacacattcgtgtgaatgaaaaggatgtgctaattagcaagtcttccatcaactttactgtcaactgcagctggttcagcgacaccaatggagctgtgaaatacttcacagtggtggtgagagaggctgatggcagtgatgagctgaagccagaacagcagcaccctctcccttcctacctggagtacaggcacaatgcctccattcgggtgtatcagactaattattttgccagcaaatgtgccgaaaatcctaacagcaactccaagagttttaacattaagcttggagcagagatggagagcttaggtggaaaacgcgatcccactcagcaaaaattctgtgatggaccactgaagccacacactgcctacagaatcagcattcgagcttttacacagctctttgatgaggacctgaaggaattcacaaagccactctattcagacacatttttttctttacccatcactactgaatcagagcccttgtttggagctattgaaggtgtgagtgctggtctgtttttaattggcatgctagtggctgttgttgccttattgatctgcagacagaaagtgagccatggtcgagaaagaccctctgcccgtctgagcattcgtagggatcgaccattatctgtccacttaaacctgggccagaaaggtaaccggaaaacttcttgtccaataaaaataaatcagtttgaagggcatttcatgaagctacaggctgactccaactaccttctatccaaggaatacgaggagttaaaagacgtgggccgaaaccagtcatgtgacattgcactcttgccggagaatagagggaaaaatcgatacaacaatatattgccctatgatgccacgcgagtgaagctctccaatgtagatgatgatccttgctctgactacatcaatgccagctacatccctggcaacaacttcagaagagaatacattgtcactcagggaccgcttcctggcaccaaggatgacttctggaaaatggtgtgggaacaaaacgttcacaacatcgtcatggtgacccagtgtgttgagaagggccgagtaaagtgtgaccattactggccagcggaccaggattccctctactatggggacctcatcctgcagatgctctcagagtccgtcctgcctgagtggaccatccgggagtttaagatatgcggtgaggaacagcttgatgcacacagactcatccgccactttcactatacggtgtggccagaccatggagtcccagaaaccacccagtctctgatccagtttgtgagaactgtcagggactacatcaacagaagcccgggtgctgggcccactgtggtgcactgcagtgctggtgtgggtaggactggaacctttattgcattggaccgaatcctccagcagttagactccaaagactctgtggacatttatggagcagtgcacgacctaagacttcacagggttcacatggtccagactgagtgtcagtatgtctacctacatcagtgtgtaagagatgtcctcagagcaagaaagctacggagtgaacaagaaaaccccttgtttccaatctatgaaaatgtgaatccagagtatcacagagatccagtctattcaaggcattgagaatgtacctgaagagctcctggataaaaattattcactgtgtgatttgtttttaaaaacttgcttcatgccctacagaggtgccagctatttctgttgatactatgtataatttattaatctggagaatgtttaaaattttatataatttaaaggtaacagatattattgtacatagttgtattttgtagtttcttctgtaaatatgtatttttcataatgtttaatattaagctttatataatactatttttccacactaaagtgttcatgacttgttctacataaaactaattcaacctgtaaa

SEQ ID NO: 108 - DNA, 2254 bp, Homo sapiens
  ref <308>: DATABASE ACCESSION NUMBER: NM_002875
gggaattctgaaagccgctggcggaccgcgcgcagcggccagagaccgagccctaaggagagtgcggcgcttcccgaggcgtgcagctgggaactgcaactcatctgggttgtgcgcagaaggctggggcaagcgagtagagaagtggagcgtaagccaggggcgttgggggccgtgcgggtcgggcgcgtgccacgcccgcggggtgaagtcggagcgcggggcctgctggagagaggagcgctgcggaccgagtaatggcaatgcagatgcagcttgaagcaaatgcagatacttcagtggaagaagaaagctttggcccacaacccatttcacggttagagcagtgtggcataaatgccaacgatgtgaagaaattggaagaagctggattccatactgtggaggctgttgcctatgcgccaaagaaggagctaataaatattaagggaattagtgaagccaaagctgataaaattctggctgaggcagctaaattagttccaatgggtttcaccactgcaactgaattccaccaaaggcggtcagagatcatacagattactactggctccaaagagcttgacaaactacttcaaggtggaattgagactggatctatcacagaaatgtttggagaattccgaactgggaagacccagatctgtcatacgctagctgtcacctgccagcttcccattgaccggggtggaggtgaaggaaaggccatgtacattgacactgagggtacctttaggccagaacggctgctggcagtggctgagaggtatggtctctctggcagtgatgtcctggataatgtagcatatgctcgagcgttcaacacagaccaccagacccagctcctttatcaagcatcagccatgatggtagaatctaggtatgcactgcttattgtagacagtgccaccgccctttacagaacagactactcgggtcgaggtgagctttcagccaggcagatgcacttggccaggtttctgcggatgcttctgcgactcgctgatgagtttggtgtagcagtggtaatcactaatcaggtggtagctcaagtggatggagcagcgatgtttgctgctgatcccaaaaaacctattggaggaaatatcatcgcccatgcatcaacaaccagattgtatctgaggaaaggaagaggggaaaccagaatctgcaaaatctacgactctccctgtcttcctgaagctgaagctatgttcgccattaatgcagatggagtgggagatgccaaagactgaatcattgggtttttcctctgttaaaaaccttaagtgctgcagcctaatgagagtgcactgctccctggggttctctacaggcctcttcctgttgtgactgccaggataaagcttccgggaaaacagctattatatcagcttttctgatggtataaacaggagacaggtcagtagtcacaaactgatctaaaatgtttattccttctgtagtgtattaatctctgtgtgttttctttggttttggaggaggggtatgaagtatctttgacatggtgccttaggaatgacttgggtttaacaagctgtctactggacaatcttatgtttccaagagaactaaagctggagagacctgacccttctctcacttctaaattaatggtaaaataaaatgcctcagctatgtagcaaagggaatgggtctgcacagattctttttttctgtcagtaaaactctcaagcaggtttttaagttgtctgtctgaatgatcttgtgtaagggtttggttatggagtcttgtgccaaacctactaggccattagcccttcaccatctacctgcttggtctttcattgctaagactaactcaagataatcctagagtcttaaagcatttcaggccagtgtggtgtcttgcgcctgtactcccagcactttgggaggccgaggcaggtggatcgcttgagccaggagttttaagtccagcttggccaagatggtgaaatcccatctctacaaaaaatgcagaacttaatctggacacactgttacacgtgcctgtagtcccagctactctatagcctgaggtgggagaatcacttaagcctggaaggtggaagttgcagtgagtcgagattgcactgctgcattccagccagggtgacagagtgagaccatgtttcaaacaagaaacatttcagagggcaagtaaacagatttgattgtgaggcttctaataaagtagttattagtagtg

SEQ ID NO: 109 - DNA, 3310 bp, Homo sapiens
  ref <308>: DATABASE ACCESSION NUMBER: NM_002996
ggcacgagggcactgagctctgccgcctggctctagccgcctgcctggcccccgccgggactcttgcccaccctcagccatggctccgatatctctgtcgtggctgctccgcttggccaccttctgccatctgactgtcctgctggctggacagcaccacggtgtgacgaaatgcaacatcacgtgcagcaagatgacatcaaagatacctgtagctttgctcatccactatcaacagaaccaggcatcatgcggcaaacgcgcaatcatcttggagacgagacagcacaggctgttctgtgccgacccgaaggagcaatgggtcaaggacgcgatgcagcatctggaccgccaggctgctgccctaactcgaaatggcggcaccttcgagaagcagatcggcgaggtgaagcccaggaccacccctgccgccgggggaatggacgagtctgtggtcctggagcccgaagccacaggcgaaagcagtagcctggagccgactccttcttcccaggaagcacagagggccctggggacctccccagagctgccgacgggcgtgactggttcctcagggaccaggctccccccgacgccaaaggctcaggatggagggcctgtgggcacggagcttttccgagtgcctcccgtctccactgccgccacgtggcagagttctgctccccaccaacctgggcccagcctctgggctgaggcaaagacctctgaggccccgtccacccaggacccctccacccaggcctccactgcgtcctccccagccccagaggagaatgctccgtctgaaggccagcgtgtgtggggtcagggacagagccccaggccagagaactctctggagcgggaggagatgggtcccgtgccagcgcacacggatgccttccaggactgggggcctggcagcatggcccacgtctctgtggtccctgtctcctcagaagggacccccagcagggagccagtggcttcaggcagctggacccctaaggctgaggaacccatccatgccaccatggacccccagaggctgggcgtccttatcactcctgtccctgacgcccaggctgccacccggaggcaggcggtggggctgctggccttccttggcctcctcttctgcctgggggtggccatgttcacctaccagagcctccagggctgccctcgaaagatggcaggagagatggcggagggccttcgctacatcccccggagctgtggtagtaattcatatgtcctggtgcccgtgtgaactcctctggcctgtgtctagttgtttgattcagacagctgcctgggatccctcatcctcatacccacccccacccaagggcctggcctgagctgggatgattggaggggggaggtgggatcctccaggtgcacaagctccaagctcccaggcattccccaggaggccagccttgaccattctccaccttccagggacagagggggtggcctcccaactcaccccagccccaaaactctcctctgctgctggctggttagaggttccctttgacgccatcccagccccaatgaacaattatttattaaatgcccagccccttctgacccatgctgccctgtgagtactacagtcctcccatctcacacatgagcatcaggccaggccctctgcccactccctgcaacctgattgtgtctcttggtcctgctgcagttgccagtcaccccggccacctgcggtgctatctcccccagccccatcctctgtacagagcccacgcccccactggtgacatgtcttttcttgcatgaggctagtgtggtgtttcctgggcactgcttccagtgaggctctgcccttggttaggsattgtgggaaggggagataagggtatctggtgactttcctctttggtctacactgtgctgagtctgaaggctgggttctgatcctagttccaccatcaagccaccaacatactcccatctgtgaaaggaaagagggaggtaaggaatacctgtccccctgacaacactcattgacctgaggcccttctctccagcccctggatgcagcctcacagtccttaccagcagagcaccttagacagtccctgccaatggactaacttgtctttggaccctgaggcccagagggcctgcargggagtgagttgatagcacagaccctgccctgtgggcccccaaatggaaatgggcagagcagagaccatccctgaaggccccgcccaggcttagtcactgagacagcccgggctctgcttcccatcacccgctaagagggagggagggctccagacacatgtccaagaagcccaggaaaggctccaggagcagccacattcctgatgcttcttcagagactcctgcaggcagccaggccacaagacccttgtggtcccaccccacacacgccagattctttcctgaggctgggctcccttcccacctctctcactccttgaaaacactgttctctgccctccaagaccttctccttcacctttgtccccaccgcagacaggaccaggggatttccatgatgttttccatgagtcccctgtttgtttctgaaagggacgctacccgggaagggggctgggacatgggaaaggggaagttgtaggcataaagtcaggggttcccttttttggctgctgaaggctcgagcatgcctggatggggctgcaccggctggcctggcccctcagggtccctggtggcagctcacctctcccttggattgtccccgacccttgccgtctacctgaggggcctcttatgggctgggttctacccaggtgctaggaacactccttcacagatgggtgcttggaggaaggaaacccagctctggtccatagagagcaaaacgctgtgctgccctgcccaccctggcctctgcactcccctgctgggtgtggcgcagcatattcaggaagctcagggccctggctcaggtggggtcactctggcagctcagagagggtgggagtgggtccaatgcactttgttctggctcttccaggctgggagagcctttcaggggtgggacaccctgtgatggggccctgcctcctttgtgaggaagccgctggggccagttggtcccccttccatggactttgttagtttctccaagcaggacatggacaaggatgatctaggaagactttggaaagagtaggaagactttggaaagacttttccaaccctcatcaccaacgtctgtgccattttgtattttactaataaaatttaaaagtcttgtgaaaaaaaaaaaaaaaaaaaaaaa

SEQ ID NO: 110 - DNA, 3199 bp, Homo sapiens
  ref <308>: DATABASE ACCESSION NUMBER: NM_003005
gtttttctaaacagcctgacactgaggggaggcagtgagactgtaagcagtctgggttgggcagaaggcagaaaaccagcagagtcacagaggagatggccaactgccaaatagccatcttgtaccagagattccagagagtggtctttggaatttcccaactcctttgcttcagtgccctgatctctgaactaacaaaccagaaagaagtggcagcatggacttatcattacagcacaaaagcatactcatggaatatttcccgtaaatactgccagaatcgctacacagacttagtggccatccagaataaaaatgaaattgattacctcaataaggtcctaccctactacagctcctactactggattgggatccgaaagaacaataagacatggacatgggtgggaaccaaaaaggctctcaccaacgaggctgagaactgggctgataatgaacctaacaacaaaaggaacaacgaggactgcgtggagatatacatcaagagtccgtcagcccctggcaagtggaatgatgagcactgcttgaagaaaaagcacgcattgtgttacacagcctcctgccaggacatgtcctgcagcaaacaaggagagtgcctcgagaccatcgggaactacacctgctcctgttaccctggattctatgggccagaatgtgaatacgtgagagagtgtggagaacttgagctccctcaacacgtgctcatgaactgcagccaccctctgggaaacttctcttttaactcgcagtgcagcttccactgcactgacgggtaccaagtaaatgggcccagcaagctggaatgcttggcttctggaatctggacaaataagcctccacagtgtttagctgcccagtgcccacccctgaagattcctgaacgaggaaacatgatctgccttcattctgcaaaagcattccagcatcagtctagctgcagcttcagttgtgaagagggatttgcattagttggaccggaagtggtgcaatgcacagcctcgggggtatggacagccccagccccagtgtgtaaagctgtgcagtgtcagcacctggaagcccccagtgaaggaaccatggactgtgttcatccgctcactgcttttgcctatggctccagctgcaaatttgagtgccagcccggctacagagtgaggggcttggacatgctccgctgcattgactctggacactggtctgcacccttgccaacctgtgaggctatttcgtgtgagccgctggagagtcctgtccacggaagcatggattgctctccatccttgagagcgtttcagtatgacaccaactgtagcttccgctgtgctgaaggtttcatgctgagaggagccgatatagttcggtgtgataacttgggacagtggacagcaccagccccagtctgtcaagctttgcagtgccaggatctcccagttccaaatgaggcccgggtgaactgctcccaccccttcggtgcctttaggtaccagtcagtctgcagcttcacctgcaatgaaggcttgctcctggtgggagcaagtgtgctacagtgcttggctactggaaactggaattctgttcctccagaatgccaagccattccctgcacacctttgctaagccctcagaatggaacaatgacctgtgttcaacctcttggaagttccagttataaatccacatgtcaattcatctgtgacgagggatattctttgtctggaccagaaagattggattgtactcgatcgggacgctggacagactccccaccaatgtgtgaagccatcaagtgcccagaactctttgccccagagcagggcagcctggattgttctgacactcgtggagaattcaatgttggctccacctgtcatttctcttgtaacaatggctttaagctggaggggcccaataatgtggaatgcacaacttctggaagatggtcagctactccaccaacctgcaaaggcatagcatcacttcctactccagggttgcaatgtccagccctcaccactcctgggcagggaaccatgtactgtaggcatcatccgggaacctttggttttaataccacttgttactttggctgcaacgctggattcacactcataggagacagcactctcagctgcagaccttcaggacaatggacagcagtaactccagcatgcagagctgtgaaatgctcagaactacatgttaataagccaatagcgatgaactgctccaacctctggggaaacttcagttatggatcaatctgctctttccattgtctagagggccagttacttaatggctctgcacaaacagcatgccaagagaatggccactggtcaactaccgtgccaacctgccaagcaggaccattgactatccaggaagccctgacttactttggtggagcggtggcttctacaataggtctgataatgggtgggacgctcctggctttgctaagaaagcgtttcagacaaaaagatgatgggaaatgccccttgaatcctcacagccacctaggaacatatggagtttttacaaacgctgcatttgacccgagtccttaaggtttccataaacacccatgaatcaaagacatggaattaccttagattagctctggaccagcctgttggacccgctctggaccaaccctgtttcctgagtttgggattgtggtacaatctcaaattctcaacctaccaccccttcctgtcccacctcttctcttcctgtaacacaagccacagaagccaggagcaaatgtttctgcagtagtctctgtgctttgactcacctgttacttgaaataccagtgaaccaaagagactggagcatctgactcacaagaagaccagactgtggagaaataaaaatacctctttattttttgattgaaggaaggttttctccactttgttggaaagcaggtggcatctctaattggaagaaattcctgtagcatcttctggagtctccagtggttgctgttgatgaggcctcttggacctctgctctgaggcttccagagagtcctctggatggcaccagaggctgcagaaggccaagaatcaagctagaaggccacatgtcaccgtggaccttcctgccaccagtcactgtccctcaaatgacccaaagaccaatattcaaatgcgtaattaaaagaattttcccc

SEQ ID NO: 111 - DNA, 4469 bp, Homo sapiens
  ref <308>: DATABASE ACCESSION NUMBER: NM_003012
cctgcagcctccggagtcagtgccgcgcgcccgccgccccgcgccttcctgctcgccgcacctccgggagccggggcgcacccagcccgcagcgccgcctccccgcccgcgccgcctccgaccgcaggccgagggccgccactggccggggggaccgggcagcagcttgcggccgcggagccgggcaacgctggggactgcgccttttgtccccggaggtccctggaagtttgcggcaggacgcgcgcggggaggcggcggaggcagccccgacgtcgcggagaacagggcgcagagccggcatgggcatcgggcgcagcgaggggggccgccgcggggccctgggcgtgctgctggcgctgggcgcggcgcttctggccgtgggctcggccagcgagtacgactacgtgagcttccagtcggacatcggcccgtaccagagcgggcgcttctacaccaagccacctcagtgcgtggacatccccgcggacctgcggctgtgccacaacgtgggctacaagaagatggtgctgcccaacctgctggagcacgagaccatggcggaggtgaagcagcaggccagcagctgggtgcccctgctcaacaagaactgccacgccgggacccaggtcttcctctgctcgctcttcgcgcccgtctgcctggaccggcccatctacccgtgtcgctggctctgcgaggccgtgcgcgactcgtgcgagccggtcatgcagttcttcggcttctactggcccgagatgcttaagtgtgacaagttcccggagggggacgtctgcatcgccatgacgccgcccaatgccaccgaagcctccaagccccaaggcacaacggtgtgtcctccctgtgacaacgagttgaaatctgaggccatcattgaacatctctgtgccagcgagtttgcactgaggatgaaaataaaagaagtgaaaaaagaaaatggcgacaagaagattgtccccaagaagaagaagcccctgaagttggggcccatcaagaagaaggacctgaagaagcttgtgctgtacctgaagaatggggctgactgtccctgccaccagctggacaacctcagccaccacttcctcatcatgggccgcaaggtgaagagccagtacttgctgacggccatccacaagtgggacaagaaaaacaaggagttcaaaaacttcatgaagaaaatgaaaaaccatgagtgccccacctttcagtccgtgtttaagtgattctcccgggggcagggtggggagggagcctcgggtggggtgggagcgggggggacagtgcccgggaacccgtggtcacacacacgcactgccctgtcagtagtggacattgtaatccagtcggcttgttcttgcagcattcccgctccctttccctccatagccacgctccaaaccccagggtagccatggccgggtaaagcaagggccatttagattaggaaggtttttaagatccgcaatgtggagcagcagccactgcacaggaggaggtgacaaaccatttccaacagcaacacagccactaaaacacaaaaagggggattgggcggaaagtgagagccagcagcaaaaactacattttgcaacttgttggtgtggatctattggctgatctatgcctttcaactagaaaattctaatgattggcaagtcacgttgttttcaggtccagagtagtttctttctgtctgctttaaatggaaacagactcataccacacttacaattaaggtcaagcccagaaagtgataagtgcagggaggaaaagtgcaagtccattatctaatagtgacagcaaagggaccaggggagaggcattgccttctctgcccacagtctttccgtgtgattgtctttgaatctgaatcagccagtctcagatgccccaaagtttcggttcctatgagcccggggcatgatctgatccccaagacatgtggaggggcagcctgtgcctgcctttgtgtcagaaaaaggaaaccacagtgagcctgagagagacggcgattttcgggctgagaaggcagtagttttcaaaacacatagttaaaaaagaaacaaatgaaaaaaattttagaacagtccagcaaattgctagtcagggtgaattgtgaaattgggtgaagagcttaggattctaatctcatgttttttccttttcacatttttaaaagaacaatgacaaacacccacttatttttcaaggttttaaaacagtctacattgagcatttgaaaggtgtgctagaacaaggtctcctgatccgtccgaggctgcttcccagaggagcagctctccccaggcatttgccaagggaggcggatttccctggtagtgtagctgtgtggctttccttcctgaagagtccgtggttgccctagaacctaacaccccctagcaaaactcacagagctttccgtttttttctttcctgtaaagaaacatttcctttgaacttgattgcctatggatcaaagaaattcagaacagcctgcctgttcccccgcactttttacatatatttgtttcatttctgcagatggaaagttgacatgggtggggtgtccccatccagcgagagagtttcaaaagcaaaacatctctgcagtttttcccaagtaccctgagatacttcccaaagcccttatgtttaatcagcgatgtatataagccagttcacttagacaactttacccttcttgtccaatgtacaggaagtagttctaaaaaaaatgcatattaatttcttcccccaaagccggattcttaattctctgcaacactttgaggacatttatgattgtccctctgggccaatgcttatacccagtgaggatgctgcagtgaggctgtaaagtggccccctgcggccctagcctgacccggagaaaggatggtagattctgttaactcttgaagactccagtatgaaaatcagcatgcccgcctagttacctaccggagagttatcctgataaattaacctctcacagttagtgatcctgtccttttaacaccttttttgtggggttctctctgacctttcatcgtaaagtgctggggaccttaagtgatttgcctgtaattttggatgattaaaaaatgtgtatatatattagctaattagaaatattctacttctctgttgtcaaactgaaattcagagcaagttcctgagtgcgtggatctgggtcttagttctggttgattcactcaagagttcagtgctcatacgtatctgctcattttgacaaagtgcctcatgcaaccgggccctctctctgcggcagagtccttagtggaggggtttacctggaacataagtagttaccacagaatacggaagagcaggtgactgtgctgtgcagctctctaaatgggaattctcaggtaggaagcaacagcttcagaaagagctcaaaataaattggaaatgtgaatcgcagctgtgggttttaccaccgtctgtctcagagtcccaggaccttgagtgtcattagttactttattgaaggttttagacccatagcagctttgtctctgtcacatcagcaatttcagaaccaaaagggaggctctctgtaggcacagagctgcactatcacgagcctttgtttttctccacaaagtatctaacaaaaccaatgtgcagactgattggcctggtcattggtctccgagagaggaggtttgcctgtgatttgcctgtgatttcctaattatcgctagggccaaggtgggatttgtaaagctttacaataatcattctggatagagtcctgggaggtccttggcagaactcagttaaatctttgaagaatatttgtagttatcttagaagatagcatgggaggtgaggattccaaaaacattttatttttaaaatatcctgtgtaacacttggctcttggtacctgtgggttagcatcaagttctccccagggtagaattcaatcagagctccagtttgcatttggatgtgtaaattacagtaatcccatttcccaaacctaaaatctgtttttctcatcagactctgagtaactggttgctgtgtcataacttcatagatgcaggaggctcaggtgatctgtttgaggagagcaccctaggcagcctgcagggaataacatactggccgttctgacctgttgccagcagatacacaggacatggatgaaattcccgtttcctctagtttcttcctgtagtactcctcttttagatcctaagtctcttacaaaagctttgaatactgtgaaaatgttttacattccatttcatttgtgttgtttttttaactgcattttaccagatgttttgatgttatcgcttatgttaatagtaattcccgtacgtgttcattttattttcatgctttttcagccatgtatcaatattcacttgactaaaatcactcaattaatcaatgaaaaaaaaaaa

SEQ ID NO: 112 - DNA, 1054 bp, Homo sapiens
  ref <308>: DATABASE ACCESSION NUMBER: NM_003090
gaattccgcgggaggccacgggctttccacagcgcgggggaacgggaggctgcaggatggtcaagctgacggcggagctgatcgagcaggcggcgcagtacaccaacgcggtgcgcgaccgggagctggacctccgggggtataaaattcccgtcattgaaaatctaggtgctacgttagaccagtttgatgctattgatttttctgacaatgagatcaggaaactggatggttttcctttgttgagaagactgaaaacattgttagtgaacaacaacagaatatgccgtataggtgagggacttgatcaggctctgccctgtctgacagaactcattctcaccaataatagtctcgtggaactgggtgatctggaccctctggcatctctcaaatcgctgacttacctaagtatcctaagaaatccggtaaccaataagaagcattacagattgtatgtgatttataaagttccgcaagtcagagtactggatttccagaaagtgaaactaaaagagcgtcaggaagcagagaaaatgttcaagggcaaacggggtgcacagcttgcaaaggatattgccaggagaagcaaaacttttaatccaggtgctggtttgccaactgacaaaaagagaggtgggccatctccaggggatgtagaagcaatcaagaatgccatagcaaatgcttcaactctggctgaagtggagaggctgaaggggttgctgcagtctggtcagatccctggcagagaacgcagatcagggcccactgatgatggtgaagaagagatggaagaagacacagtcacaaacgggtcctgagcagtgaggcagatgtataataataggccctcttggaacaagtcttgcttttcgaacatggtataatagccttgtttgtgttagcaaagtggaatctatcagcattgttgaaatgcttaagactgctgctgataattttgtaatataagttttgaaatctaaatgtcaattttctacaaattataaaaataaactccactctctatgctaaaaaaaaaaaaaaggaattc

SEQ ID NO: 113 - DNA, 4298 bp, Homo sapiens
  ref <308>: DATABASE ACCESSION NUMBER: NM_003152
cagacaggatattcactgctgtggcaaggcctgtagagagtttcgaagttaggaggactcaagacggtccctccctggacttttctgaaggggctcaaaagatgacacgcgccagagctggaaggcgtcgccaattggtccaacttttccctcctccctttttgcggatgagaaaaactgaggcccaggtttgggatttccagagcccgggatttcccggcaacgccgacaaccacattcccccggctattctgacccgccccggttccgggacgctccctgggagccgccgccgagggcctgctgggactcccggggaccccgccgtcggggcagcccccacgcccggcgccgcccgccggaacggcgccgctgttgcgcacttgcaggggagccggcgactgagggcgaggcagggagggagcaagcggggctgggagggctgctggcgcgggctcgccggctgtgtatggtctatcgcaggcagctgacctttgaggaggaaatcgctgctctccgctccttcctgtagtaacagccgccgctgccgccgccgccaggaaccccggccgggagcgagagccgcggggcgcagagccggcccggctgccggacggtgcggccccaccaggtgaacggccatggcgggctggatccaggcccagcagctgcagggagacgcgctgcgccagatgcaggtgctgtacggccagcacttccccatcgaggtccggcactacttggcccagtggattgagagccagccatgggatgccattgacttggacaatccccaggacagagcccaagccacccagctcctggagggcctggtgcaggagctgcagaagaaggcggagcaccaggtgggggaagatgggtttttactgaagatcaagctggggcactacgccacgcagctccagaaaacatatgaccgctgccccctggagctggtccgctgcatccggcacattctgtacaatgaacagaggctggtccgagaagccaacaattgcagctctccggctgggatcctggttgacgccatgtcccagaagcaccttcagatcaaccagacatttgaggagctgcgactggtcacgcaggacacagagaatgagctgaagaaactgcagcagactcaggagtacttcatcatccagtaccaggagagcctgaggatccaagctcagtttgcccagctggcccagctgagcccccaggagcgtctgagccgggagacggccctccagcagaagcaggtgtctctggaggcctggttgcagcgtgaggcacagacactgcagcagtaccgcgtggagctggccgagaagcaccagaagaccctgcagctgctgcggaagcagcagaccatcatcctggatgacgagctgatccagtggaagcggcggcagcagctggccgggaacggcgggccccccgagggcagcctggacgtgctacagtcctggtgtgagaagttggccgagatcatctggcagaaccggcagcagatccgcagggctgagcacctctgccagcagctgcccatccccggcccagtggaggagatgctggccgaggtcaacgccaccatcacggacattatctcagccctggtgaccagcacattcatcattgagaagcagcctcctcaggtcctgaagacccagaccaagtttgcagccaccgtacgcctgctggtgggcgggaagctgaacgtgcacatgaatcccccccaggtgaaggccaccatcatcagtgagcagcaggccaagtctctgcttaaaaatgagaacacccgcaacgagtgcagtggtgagatcctgaacaactgctgcgtgatggagtaccaccaagccacgggcaccctcagtgcccacttcaggaacatgtcactgaagaggatcaagcgtgctgaccggcggggtgcagagtccgtgacagaggagaagttcacagtcctgtttgagtctcagttcagtgttggcagcaatgagcttgtgttccaggtgaagactctgtccctacctgtggttgtcatcgtccacggcagccaggaccacaatgccacggctactgtgctgtgggacaatgcctttgctgagccgggcagggtgccatttgccgtgcctgacaaagtgctgtggccgcagctgtgtgaggcgctcaacatgaaattcaaggccgaagtgcagagcaaccggggcctgaccaaggagaacctcgtgttcctggcgcagaaactgttcaacaacagcagcagccacctggaggactacagtggcctgtccgtgtcctggtcccagttcaacagggagaacttgccgggctggaactacaccttctggcagtggtttgacggggtgatggaggtgttgaagaagcaccacaagccccactggaatgatggggccatcctaggttttgtgaataagcaacaggcccacgacctgctcatcaacaagcccgacgggaccttcttgttgcgctttagtgactcagaaatcgggggcatcaccatcgcctggaagtttgactccccggaacgcaacctgtggaacctgaaaccattcaccacgcgggatttctccatcaggtccctggctgaccggctgggggacctgagctatctcatctatgtgtttcctgaccgccccaaggatgaggtcttctccaagtactacactcctgtgctggctaaagctgttgatggatatgtgaaaccacagatcaagcaagtggtccctgagtttgtgaatgcatctgcagatgctgggggcagcagcgccacgtacatggaccaggccccctccccagctgtgtgcccccaggctccctataacatgtacccacagaaccctgaccatgtactcgatcaggatggagaattcgacctggatgagaccatggatgtggccaggcacgtggaggaactcttacgccgaccaatggacagtcttgactcccgcctctcgccccctgccggtcttttcacctctgccagaggctccctctcatgaatgtttgaatcccacgcttctctttggaaacaatatgcaatgtgaagcggtcgtgttgtgagtttagtaaggttgtgtacactgacacctttgcaggcatgcatgtgcttgtgtgtgtgtgtgtgtgtgtgtccttgtgcatgagctacgcctgcctcccctgtgcagtcctgggatgtggctgcagcagcggtggcctcttttcagatcatggcatccaagagtgcgccgagtctgtctctgtcatggtagagaccgagcctctgtcactgcaggcactcaatgcagccagacctattcctcctgggcccctcatctgctcagcagctatttgaatgagatgattcagaaggggaggggagacaggtaacgtctgtaagctgaagtttcactccggagtgagaagctttgccctcctaagagagagagacagagagacagagagagagaaagagagagtgtgtgggtctatgtaaatgcatctgtcctcatgtgttgatgtaaccgattcatctctcagaagggaggctgggggttcattttcgagtagtattttatactttagtgaacgtggactccagactctctgtgaaccctatgagagcgcgtctgggcccggccatgtccttagcacaggggggccgccggtttgagtgagggtttctgagctgctctgaattagtccttgcttggctgcttggccttgggcttcattcaagtctatgatgctgttgcccacgtttcccgggatatatattctctcccctccgttgggccccagccttctttgcttgcctctctgtttgtaaccttgtcgacaaagaggtagaaaagattgggtctaggatatggtgggtggacaggggccccgggacttggagggttggtcctcttgcctcctggaaaaaacaaaaacaaaaaactgcagtgaaagacaagctgcaaatcagccatgtgctgcgtgcctgtggaatctggagtgaggggtaaaagctgatctggtttgactccgctggaggtggggcctggagcaggccttgcgctgttgcgtaactggctgtgttctggtgaggccttgctcccaaccccacacgctcctccctctgaggctgtaggactcgcagtcaggggcagctgaccatggaagattgagagcccaaggtttaaacttctctgaagggaggtggggatgagaagaggggtttttttgtactttgtacaaagaccacacatttgtgtaaacagtgttttggaataaaatatttttttcat

SEQ ID NO: 114 - DNA, 1327 bp, Homo sapiens
  ref <308>: DATABASE ACCESSION NUMBER: NM_003160
cacaacggccatcaccacctctccgcaccctctgtctccttccttctcgggcctcacccctggccctcgctttcagtgcccagcccggaccgcagcactccagttccgccccaacccgggaaccctggactgaggctcccgtttctgtcctttctattgggcgcacttccgatggcgtcaggaatttcagccaataggagccagccaggaagtacctctctgagcggttggtgccgggtataaaagaaggccagcacggctgctcacgacgccgcgaagcctgtgtagcactgagacatcagtgagttggctacagcagaccaaacagcccagcagcccagcagcccacgcatgcggcgcctcacagtcgatgactttgaaatcgggcgtcccctgggcaaggggaaatttgggaatgtgtacctggctcggctcaaggaaagccatttcattgtggccctgaaggttctcttcaagtcgcagatagagaaggaaggactggagcaccagctgcgccgggaaattgagatccaggctcatctacaacaccccaatatcctgcgcctgtataactatttccatgatgcacgccgggtgtacctgattctggaatatgctccaaggggtgagctctacaaggagctgcagaaaagcgagaaattagatgaacagcgcacagccacgataatagaggaagttgcagatgccctgacctactgccatgacaagaaagtgattcacagagatattaagccagagaacctgctgctggggttcaggggtgaggtgaagattgcagattttggctggtctgtgcacacccccctccctgagaggaagacaatgtgtgggacactggactacttgccgccagaaatgattgaggggagaacatatgatgaaaaggtggatttgtggtgcattggagtgctctgctatgagctgctggtgggatatccaccctttgagagcgcctcccacagtgagacttacagacgcatcctcaaggtagatgtgaggtttccactatcaatgcctctgggggcccgggacttgatttccaggcttctcagataccagcccttggagagactgcccctggcccagatcctgaagcacccctgggttcaggcccactcccgaagggtgctgcctccctgtgctcagatggcttcctgagccctgtctgcctctgttccctttgtgtgtgttcagggagctctcctgctctgccacctcatttgtctttatttttttctcttttaagatgtaagatgctaattaataaaagctgaatcatttcataccaaaaaaaaaaaaaaaaaaa

SEQ ID NO: 115 - DNA, 3523 bp, Homo sapiens
  ref <308>: DATABASE ACCESSION NUMBER: NM_003183
tcgagcctggcggtagaatcttcccagtaggcggcgcgggagggaaaagaggattgaggggctaggccgggcggatcccgtcctcccccgatgtgagcagttttccgaaaccccgtcaggcgaaggctgcccagagaggtggagtcggtagcggggccgggaacatgaggcagtctctcctattcctgaccagcgtggttcctttcgtgctggcgccgcgacctccggatgacccgggcttcggcccccaccagagactcgagaagcttgattctttgctctcagactacgatattctctctttatctaatatccagcagcattcggtaagaaaaagagatctacagacttcaacacatgtagaaacactactaactttttcagctttgaaaaggcattttaaattatacctgacatcaagtactgaacgtttttcacaaaatttcaaggtcgtggtggtggatggtaaaaacgaaagcgagtacactgcaaaatggcaggacttcttcactggacacgtggttggtgagcctgactctagggttctagcccacataagagatgatgatgttataatcagaatcaacacagatggggccgaatataacatagagccactttggagatttgttaatgataccaaagacaaaagaatgttagtttataaatctgaagatatcaagaatgtttcacgtttgcagtctccaaaagtgtgtggttatttaaaagtggataatgaagagttgctcccaaaagggttagtagacagagaaccacctgaagagcttgttcatcgagtgaaaagaagagctgacccagatcccatgaagaacacgtgtaaattattggtggtagcagatcatcgcttctacagatacatgggcagaggggaagagagtacaactacaaattacttaatagagctaattgacagagttgatgacatctatcggaacacttcatgggataatgcaggttttaaaggctatggaatacagatagagcagattcgcattctcaagtctccacaagaggtaaaacctggtgaaaagcactacaacatggcaaaaagttacccaaatgaagaaaaggatgcttgggatgtgaagatgttgctagagcaatttagctttgatatagctgaggaagcatctaaagtttgcttggcacaccttttcacataccaagattttgatatgggaactcttggattagcttatgttggctctcccagagcaaacagccatggaggtgtttgtccaaaggcttattatagcccagttgggaagaaaaatatctatttgaatagtggtttgacgagcacaaagaattatggtaaaaccatccttacaaaggaagctgacctggttacaactcatgaattgggacataattttggagcagaacatgatccggatggtctagcagaatgtgccccgaatgaggaccagggagggaaatatgtcatgtatcccatagctgtgagtggcgatcacgagaacaataagatgttttcaaactgcagtaaacaatcaatctataagaccattgaaagtaaggcccaggagtgttttcaagaacgcagcaataaagtttgtgggaactcgagggtggatgaaggagaagagtgtgatcctggcatcatgtatctgaacaacgacacctgctgcaacagcgactgcacgttgaaggaaggtgtccagtgcagtgacaggaacagtccttgctgtaaaaactgtcagtttgagactgcccagaagaagtgccaggaggcgattaatgctacttgcaaaggcgtgtcctactgcacaggtaatagcagtgagtgcccgcctccaggaaatgctgaaaatgacactgtttgcttggatcttggcaagtgtaaggatgggaaatgcatccctttctgcgagagggaacagcagctggagtcctgtgcatgtaatgaaactgacaactcctgcaaggtgtgctgcagggacctttctggccgctgtgtgccctatgtcgatgctgaacaaaagaacttatttttgaggaaaggaaagccctgtacagtaggattttgtgacatgaatggcaaatgtgagaaacgagtacaggatgtaattgaacgattttgggatttcattgaccagctgagcatcaatacttttggaaagtttttagcagacaacatcgttgggtctgtcctggttttctccttgatattttggattcctttcagcattcttgtccattgtgtggataagaaattggataaacagtatgaatctctgtctctgtttcaccccagtaacgtcgaaatgctgagcagcatggattctgcatcggttcgcattatcaaaccctttcctgcgccccagactccaggccgcctgcagcctgcccctgtgatcccttcggcgccagcagctccaaaactggaccaccagagaatggacaccatccaggaagaccccagcacagactcccatatggacgaggatgggtttgagaaggaccccttcccaaatagcagcacagctgccaagtcatttgaggatctcacggaccatccggtcgccagaagtgaaaaggctgcctcctttaaactgcagcgtcagaatcgtgttaacagcaaagaaacagagtgctaatttagttctcagctcttctgacttaagtgtgcaaaatatttttatagatttgacctacaaatcaatcacagcttgtattttgtgaagactgggaagtgacttagcagatgctggtcatgtgtttgaacttcctgcaggtaaacagttcttgtgtggtttggcccttctccttttgaaaaggtaaggtgaaagtgaatctacttattttgaggctttcaggttttagtttttaaaatatcttttgacctgtggtgcaaaagcagaaaatacagctggattgggttatgaatatttacgtttttgtaaattaatcttttatattgataacagcactgactagggaaatgatcagtttttttttatacactgtaatgaaccgctgaatatgaagcatttggcatttatttgtgagaaaagtggaatagttttttttttttttttttttttttgccttcaactaaaaacaaaggagataaatttagtatacattgtatctaaattgtgggtctatttctagttattacccagagtttttatgtagcagggaaaatatatatctaaatttagaaatcatttgggttaatatggctcttcataattctaagactaatgctcagaacctaaccactaccttacagtgagggctatacatggtagccagttgaatttatggaatctaccaactgtttagggccctgatttgctgggcagtttttctgtattttataagtatcttcatgtatccctgttactgatagggatacatgtcttagaaaattcactattggctgggagtggtggctcatgcctgtaatcccagcacttggagaggctgaggttgcgccactacactccagcctgggtgacagagtgagatctgcctc

SEQ ID NO: 116 - DNA, 1749 bp, Homo sapiens
  ref <308>: DATABASE ACCESSION NUMBER: NM_003195
agctaccgcgcgctcacacctgcagggccccacaagaggcctcccagtgtgcgcgggcctcttgaagaagtaactctactcagaggcccgaatgacccaaactgggctctgggaggctggggacggccttccaggccaagtggggcgcgcgcagggctcagcggggcccaagagaagggctgagggcactgggtcctgagccacccaccgaaggacgccgcgggacagcaaggcccgaagcaggaggagagaagggagcagattcctgggcctcctggggcccggtcgctccgggatgtctgagctctgggaggggcgtgcccggggcgcctccctcgcggggtattgtgggatcacgagtcactggcgacggtgggtcaggactacacttcccaggaggctgtgcgcgccgcgtggcgcctgggagttgtggtccagagcgcgggcgcggcgggcgcggcaggcgggcgcgtggactacgcatcctaggatgccgcgcgcggccgcggggccgagggtttgaaccgggggtctgtcgtccgcggcggggctgcgtcggctgcggcgggtgtgggaggtggcgacggccggggccggggtcctgcccggctgcggaggcgggcgcgacgggcgcgggggtcgctgctcctgaggcgatgatgggcaaggaagaggagattgcgcggatcgcccggaggctggacaagatggtgaccaagaagagcgcggagggagccatggatttgctgcgggagctgaaggccatgcctatcacgctgcacctgctccagtccacccgagtcgggatgtctgtcaacgcccttcggaagcagagctcggatgaggaggtcattgcactggccaagtctctcatcaagtcctggaagaagctcctggatgcttccgatgccaaagccagggagcgggggaggggcatgcctctgcccacgtcctcgagggatgcctcagaggccccggatcccagccgcaagaggccggagctgcccagggcaccgtcgactccgaggatcaccacatttcctccggtgcctgtcacctgtgatgccgtgcgcaacaagtgccgcgagatgctgaccgctgccctgcagacggaccatgaccacgtggccatcggtgcggactgcgagcgcctgtcggctcagatcgaggaatgcatcttccgggacgttggaaacacagacatgaagtataagaaccgtgtacggagtcgtatctccaacctgaaggatgccaagaaccctgacctgcggcggaatgtgctgtgtggggccataacaccccagcagatcgctgtgatgacctcagaggagatggccagtgatgagctgaaggagatccgtaaggccatgaccaaggaggccatccgagagcaccagatggcccgcactggcggcacgcagacagacctgttcacctgcggcaagtgcaggaaaaagaactgcacctacacacaggtgcagacccgcagctctgatgagcccatgaccacctttgttgtctgcaacgagtgtggaaaccgctggaagttctgctgacccctcgtgtagatgtgctgcagccttgggccctccccggcccacgtcctccgttgacacagcttctctggagaccctagaaggcggcatgtcctgccctcaacctgcctgcctggattgcacctttctgccctttccccctcattattaaatgtttctttttgccaaaaaaaacaaaaaaaaaaaaaaaaaa

SEQ ID NO: 117 - DNA, 4208 bp, Homo sapiens
  ref <308>: DATABASE ACCESSION NUMBER: NM_003243
tctttaagatttgtagctactaagaaagaaaggagctttttttccttgggccttcaaactgaaagaaccgcatgagcctgacggcgcatggtcttaacatcaggctgtgcaggaagaagctatctgcagatggatgccagcacacacaaggaagcagagctctggcaacattgagtcaaagcaaggacacaacatcagagggacggcagagaatccttgtgtgtagtctttggtggcagtttgaaaattgcaaggagggactttaagactacttctgatttgcaaagatggtctgtgctccgagcaggctaaagtgactggacgagacgcactgttggagaaataaaaatgacttcccattatgtgattgccatctttgccctgatgagcttctgtttagccactgcaggtccagagcctggtgcactgtgtgaactgtcacctgtcagtgcctcccatcctgtccaggccttgatggagagcttcactgttttgtcaggctgtgccagcagaggcacaactgggctgccacaggaggtgcatgtcctgaatctcgcactgcgccaggggcctggccagctacagagagaggtcacacttcacctgaatcccatctcctcagtccacatccaccacaagtctgttgtgttcctgctcaactccccacaccccctggtgtggcatctgaagacagagagacttgccactggggtctccagactgtttttggtgtctgagggttctgtggtccagttttcatcagcaaacttctccttgacagcagaaacagaagaaaggaacttcccccatggaaatgaacatctgttaaattgggcccgaaaagagtatggagcagttacttcattcaccgaactcaagatagcaagaaacatttatattaaagtgggggaagatcaagtgttccctccaaagtgcaacatagggaagaattttctctcactcaattaccttgctgagtaccttcaacccaaagcagcagaagggtgtgtgatgtccagccagccccagaatgaggaagtacacatcatcgagctaatcacccccaactctaacccctacagtgctttccaggtggatataacaattgatataagaccttctcaagaggatcttgaagtggtcaaaaatctcatcctgatcttgaagtgcaaaaagtctgtcaactgggtgatcaaatcttttgatgttaagggaagcctgaaaattattgctcctaacagtattggctttggaaaagagagtgaaagatctatgacaatgaccaaatcaataagagatgacattccttcaacccaagggaatctggtgaagtgggctttggacaatggctatagtccaataacttcatacacaatggctcctgtggcaatagtatttcatcttcggcttgaaaataatgaggagatgggagatgaggaagtccacactattcctcctgagctacggatcctgctggaccctggtgccctgcctgccctgcagaacccgcccatccggggaggggaaggccaaaatggaggccttccgtttcctttcccagatatttccaggagagtctggaatgaagagggagaagatgggctccctcggccaaaggaccctgtcattcccagcatacaactgtttcctggtctcagagagccagaagaggtgcaagggagcgtggatattgccctgtctgtcaaatgtgacaatgagaagatgatcgtggctgtagaaaaagattcttttcaggccagtggctactcggggatggacgtcaccctgttggatcctacctgcaaggccaagatgaatggcacacactttgttttggagtctcctctgaatggctgcggtactcggccccggtggtcagcccttgatggtgtggtctactataactccattgtgatacaggttccagcccttggggacagtagtggttggccagatggttatgaagatctggagtcaggtgataatggatttccgggagatatggatgaaggagatgcttccctgttcacccgacctgaaatcgtggtgtttaattgcagccttcagcaggtgaggaaccccagcagcttccaggaacagccccacggaaacatcaccttcaacatggagctatacaacactgacctctttttggtgccctcccagggcgtcttctctgtgccagagaatggacacgtttatgttgaggtatctgttactaaggctgaacaagaactgggatttgccatccaaacgtgctttatctctccatattcgaaccctgataggatgtctcattacaccattattgagaatatttgtcctaaagatgaatctgtgaaattctacagtcccaagagagtgcacttccctatcccgcaagctgacatggataagaagcgattcagctttgtcttcaagcctgtcttcaacacctcactgctctttctacagtgtgagctgacgctgtgtacgaagatggagaagcacccccagaagttgcctaagtgtgtgcctcctgacgaagcctgcacctcgctggacgcctcgataatctgggccatgatgcagaataagaagacgttcaccaagccccttgctgtgatccaccatgaagcagaatctaaagaaaaaggtccaagcatgaaggaaccaaatccaatttctccaccaattttccatggtctggacaccctaaccgtgatgggcattgcgtttgcagcctttgtgatcggagcactcctgacgggggccttgtggtacatctattctcacacaggggagacagcaggaaggcagcaagtccccacctccccgccagcctcggaaaacagcagtgctgcccacagcatcggcagcacgcagagcacgccttgctccagcagcagcacggcctagcccaacccaggcccaacccggcccaacccagcccagcccagctcagctcagctactccaagggcaggaccaatggctgagcctcgtgtccagactcagagggctggattttggttcccttgtaaagacagagtgaatttcagtataaagatcacccgttgtattcaccccacacccagggctagtataaacatgaccctgggcttctgtaccacactagaattcatgtgagaaagctaaaatggtggtcttctccaccagcccctcacaggcttgggggttttctatgtgaaacacatgccagtttttaaaatgctgctttgtccaggtgagaacatccataatttggggccctgagttttacccagactcaaggagttggtaaagggttaatagccagatagtagaaccagtgaggagatgcggccaaagattctttatatctgaaccaagatgtaaaacaagaaatgctttgaggctttctaagcgatcctcctgtctaatttgcacctttgtctggatgcactcttctgaccttgctgccacaacctgtggggtctgatgtgtcccaagatgggtgctgccctcagggactgcaccctgacaagtgttaaggcaacattccttgcttgtgccctgggccaaaaccaatgctgatgaccttatcagcttcctgtttcttcccatactgcatacaccactgcaaaatgtcttaatgcaaattttgtatttcttacaggcctacagaaattgaaaatgaccaaaatcaggaaccacagatttgtgcccattcctaatattttgttctgcaaattaatgtataatttgaggtgaaattcagttataaagtcaaggacgaatttgcacagtgatatatttctatgtgtatgcaagtacaagtatataatatgtcacctggcacattcattttctcagttgaagaagagaaaatttgaaaatgtccttatgcttttagagttgcaacttaagtatatttggtagggtgagtgtttccactcaaaatatgtcaacttaaaaaaaaataggccctttcataaaaaccaaactgtagcaagatgcaaatgcatggcaaatctgtcggtctccagttggttatctgaatagtgtcaccaattccaccaagacagtgctgagattggaaagggcactcatttggattgccttacttctcttgccttaaatatatcccatatatttaatatgtcaaaaagggcttgaggtgaatttcattaaatggaataatatgatgccactttgcagctaaaataagctcagtgatacctccttgtt

SEQ ID NO: 118 - DNA, 2984 bp, Homo sapiens
  ref <308>: DATABASE ACCESSION NUMBER: NM_003318
ggaaattcaaacgtgtttgcggaaaggagtttgggttccatcttttcatttccccagcgcagctttctgtagaaatggaatccgaggatttaagtggcagagaattgacaattgattccataatgaacaaagtgagagacattaaaaataagtttaaaaatgaagaccttactgatgaactaagcttgaataaaatttctgctgatactacagataactcgggaactgttaaccaaattatgatgatggcaaacaacccagaggactggttgagtttgttgctcaaactagagaaaaacagtgttccgctaagtgatgctcttttaaataaattgattggtcgttacagtcaagcaattgaagcgcttcccccagataaatatggccaaaatgagagttttgctagaattcaagtgagatttgctgaattaaaagctattcaagagccagatgatgcacgtgactactttcaaatggccagagcaaactgcaagaaatttgcttttgttcatatatcttttgcacaatttgaactgtcacaaggtaatgtcaaaaaaagtaaacaacttcttcaaaaagctgtagaacgtggagcagtaccactagaaatgctggaaattgccctgcggaatttaaacctccaaaaaaagcagctgctttcagaggaggaaaagaagaatttatcagcatctacggtattaactgcccaagaatcattttccggttcacttgggcatttacagaataggaacaacagttgtgattccagaggacagactactaaagccaggtttttatatggagagaacatgccaccacaagatgcagaaataggttaccggaattcattgagacaaactaacaaaactaaacagtcatgcccatttggaagagtcccagttaaccttctaaatagcccagattgtgatgtgaagacagatgattcagttgtaccttgttttatgaaaagacaaacctctagatcagaatgccgagatttggttgtgcctggatctaaaccaagtggaaatgattcctgtgaattaagaaatttaaagtctgttcaaaatagtcatttcaaggaacctctggtgtcagatgaaaagagttctgaacttattattactgattcaataaccctgaagaataaaacggaatcaagtcttctagctaaattagaagaaactaaagagtatcaagaaccagaggttccagagagtaaccagaaacagtggcaatctaagagaaagtcagagtgtattaaccagaatcctgctgcatcttcaaatcactggcagattccggagttagcccgaaaagttaatacagagcagaaacataccacttttgagcaacctgtcttttcagtttcaaaacagtcaccaccaatatcaacatctaaatggtttgacccaaaatctatttgtaagacaccaagcagcaataccttggatgattacatgagctgttttagaactccagttgtaaagaatgactttccacctgcttgtcagttgtcaacaccttatggccaacctgcctgtttccagcagcaacagcatcaaatacttgccactccacttcaaaatttacaggttttagcatcttcttcagcaaatgaatgcatttcggttaaaggaagaatttattccattttaaagcagataggaagtggaggttcaagcaaggtatttcaggtgttaaatgaaaagaaacagatatatgctataaaatatgtgaacttagaagaagcagataaccaaactcttgatagttaccggaacgaaatagcttatttgaataaactacaacaacacagtgataagatcatccgactttatgattatgaaatcacggaccagtacatctacatggtaatggagtgtggaaatattgatcttaatagttggcttaaaaagaaaaaatccattgatccatgggaacgcaagagttactggaaaaatatgttagaggcagttcacacaatccatcaacatggcattgttcacagtgatcttaaaccagctaactttctgatagttgatggaatgctaaagctaattgattttgggattgcaaaccaaatgcaaccagatacaacaagtgttgttaaagattctcaggttggcacagttaattatatgccaccagaagcaatcaaagatatgtcttcctccagagagaatgggaaatctaagtcaaagataagccccaaaagtgatgtttggtccttaggatgtattttgtactatatgacttacgggaaaacaccatttcagcagataattaatcagatttctaaattacatgccataattgatcctaatcatgaaattgaatttcccgatattccagagaaagatcttcaagatgtgttaaagtgttgtttaaaaagggacccaaaacagaggatatccattcctgagctcctggctcatccctatgttcaaattcaaactcatccagttaaccaaatggccaagggaaccactgaagaaatgaaatatgttctgggccaacttgttggtctgaattctcctaactccattttgaaagctgctaaaactttatatgaacactatagtggtggtgaaagtcataattcttcatcctccaagacttttgaaaaaaaaaggggaaaaaaatgatttgcagttattcgtaatgtcaaataccacctataaaatatattggactgttatactcttgaatccctgtggaaatctacatttgaagacaacatcactctgaagtgttatcagcaaaaaaaattcagtagattatctttaaaagaaaactgtaaaaatagcaaccacttatggtactgtatatattgtagacttgttttctctgttttatgctcttgtgtaatctacttgacatcattttactcttggaatagtgggtggatagcaagtatattctaaaaaactttgtaaataaagttttgtggctaaaatgacactaaaaaaaaaaaaaaaaaa

SEQ ID NO: 119 - DNA, 1796 bp, Homo sapiens
  ref <308>: DATABASE ACCESSION NUMBER: NM_003364
ggtcagctgagttcgccggcccagggcaggcggggcccgagcctagcggtaacccccgggcagggcggggccgctcgcagactccatatgagattcacctcgcaggtggttccctcattcgagtgctccggcgcacagacccgcgccccgccgtctgcgagcctcccgagagccgtcccttcgtccggccctggagcattgcgtttgtcgccggtgtcgcagtgcgaggatggcgccgcgggtgtagcggctctctgcgcaggccgagtgggcccagagaagcgaggaactccgcagctcgtcgacacgtctcgtctcctgtcccaattcagggcttggtgaggtgactcgcggtcgcgggtgactcgccggcaggacactgcctggaacgcctggagcgcctcccactgcagacgtctgtccgcctccagccgctctcctctgacgggtcctgcctcagttggcggaatggcggccacgggagccaatgcagagaaagctgaaagtcacaatgattgccccgtcagacttttaaatccaaacatagcaaaaatgaaagaagatattctctatcatttcaatctcaccactagcagacacaatttcccagccttgtttggagatgtgaagtttgtgtgtgttggtggaagcccctcccggatgaaagccttcatcaggtgcgttggtgcagagctgggccttgactgcccaggtagagactatcccaacatctgtgcgggaactgaccgctatgccatgtataaagtaggaccggtgctgtctgtcagtcatggtatgggcattccttctatctcaatcatgttgcatgagctcataaagctgctgtactatgcccggtgctccaacgtcactatcatccgcattggcacttctggtgggataggtctggagcccggcactgtggtcataacagagcaggcagtggatacctgcttcaaggcagagtttgagcagattgtcctggggaagcgggtcatccggaaaacggaccttaacaagaagctggtgcaggagctgttgctgtgttctgcagagctgagcgagttcaccacagtggtggggaacaccatgtgcaccttggacttctatgaagggcaaggccgtctggatggggctctctgctcctacacggagaaggacaagcaggcgtatctggaggcagcctatgcagccggcgtccgcaatatcgagatggagtcctcggtgtttgccgccatgtgcagcgcctgcggcctccaagcggccgtggtgtgtgtcaccctcctgaaccgcctggaaggggaccagatcagcagccctcgcaatgtgctcagcgagtaccagcagaggccgcagcggctggtgagctacttcatcaagaagaaactgagcaaggcctgagcgctgccctgcacctccgcagacctgctgtgatgacttgccattaaaagcattgtccaaaatcccctgttgtgtggactttgagcacactttacacaagaatctagaaaatcagatcgcgattaagagacagagaatcttggattaaccgcatgggagatgttcttccttttgaagtttcattggagcattttcaatgatgttagcctgatttggggtttcttcaagaacattctaccaaatttttgtactatttctagggaaatttttcagactttaaaattctaatggtagtcagatttcatgtcactaaacaagaaatctgacaatagtgccaggaaactaatttcctgatacattaaaaaaattccatgcaaaaaaaaaaaaaaaaaaaa

SEQ ID NO: 120 - DNA, 1938 bp, Homo sapiens
  ref <308>: DATABASE ACCESSION NUMBER: NM_003504
gatttggcgggagtcttgaccgccgccgggctcttggtacctcagcgcgagcgccaggcgtccggccgccgtggctatgttcgtgtccgatttccgcaaagagttctacgaggtggtccagagccagagggtccttctcttcgtggcctcggacgtggatgctctgtgtgcgtgcaagatccttcaggccttgttccagtgtgaccacgtgcaatatacgctggttccagtttctgggtggcaagaacttgaaactgcatttcttgagcataaagaacagtttcattattttattctcataaactgtggagctaatgtagacctattggatattcttcaacctgatgaagacactatattctttgtgtgtgacacccataggccagtcaatgtcgtcaatgtatacaacgatacccagatcaaattactcattaaacaagatgatgaccttgaagttcccgcctatgaagacatcttcagggatgaagaggaggatgaagagcattcaggaaatgacagtgatgggtcagagccttctgagaagcgcacacggttagaagaggagatagtggagcaaaccatgcggaggaggcagcggcgagagtgggaggcccggagaagagacatcctctttgactacgagcagtatgaatatcatgggacatcgtcagccatggtgatgtttgagctggcttggatgctgtccaaggacctgaatgacatgctgtggtgggccatcgttggactaacagaccagtgggtgcaagacaagatcactcaaatgaaatacgtgactgatgttggtgtcctgcagcgccacgtttcccgccacaaccaccggaacgaggatgaggagaacacactctccgtggactgcacacggatctcctttgagtatgacctccgcctggtgctctaccagcactggtccctccatgacagcctgtgcaacaccagctataccgcagccaggttcaagctgtggtctgtgcatggacagaagcggctccaggagttccttgcagacatgggtcttcccctgaagcaggtgaagcagaagttccaggccatggacatctccttgaaggagaatttgcgggaaatgattgaagagtctgcaaataaatttgggatgaaggacatgcgcgtgcagactttcagcattcattttgggttcaagcacaagtttctggccagcgacgtggtctttgccaccatgtctttgatggagagccccgagaaggatggctcagggacagatcacttcatccaggctctggacagcctctccaggagtaacctggacaagctgtaccatggcctggaactcgccaagaagcagctgcgagccacccagcagaccattgccagctgcctttgcaccaacctcgtcatctcccaggggcctttcctgtactgctctctcatggagggcactccagatgtcatgctgttctctaggccggcatccctaagcctgctcagcaaacacctgctcaagtcctttgtgtgttcgacaaagaaccggcgctgcaaactgctgcccctggtgatggctgcccccctgagcatggagcatggcacagtgaccgtggtgggcatccccccagagaccgacagctcggacaggaagaacttttttgggagggcgtttgagaaggcagcggaaagcaccagctcccggatgctgcacaaccattttgacctctcagtaattgagctgaaagctgaggatcggagcaagtttctggacgcacttatttccctcctgtcctaggaatttgattcttccagaatgaccttcttatttatgtaactggctttcatttagattgtaagttatggacatgatttgagatgtagaagccattttttattaaataaaatgcttattttaggctccgtccccaaaaaaaaaaaaaaaaaaaaaaaaaaaaa

SEQ ID NO: 121 - DNA, 1243 bp, Homo sapiens
  ref <308>: DATABASE ACCESSION NUMBER: NM_003551
gcagccaccgtccccacgctggggcttcaggtctcctagcaacaagttgtaccatatgaggacggccgctgagccataatggagatatcaatgcctccacctcagatatatgtagaaaaaactctggccattatcaaaccagatattgttgacaaagaggaggagatacaagatattattcttagatccggattcaccattgttcagagaagaaaactacgcctcagccctgagcaatgtagtaacttttatgtggaaaagtatggaaaaatgtttttccccaacttaacagcttacatgagttctggaccacttgtcgccatgatattagctagacataaagccatctcttattggttagaacttttgggaccaaataatagcttagtagcgaaggagacacatccagacagtctgagggcaatttatggcacagatgacctaaggaatgcacttcatgggagtaatgactttgctgctgcggaaagagaaatacgttttatgtttcctgaagtgattgttgagcccattccaattggacaagctgctaaggactatttaaatttacatataatgccaactctgcttgaaggactcacagagctttgtaagcaaaaaccagcagatcctttgatttggctagctgattggctgctgaaaaataatcctaacaaacccaaactttgtcaccatccaattgtagaagaaccttattaaaaaaaaaatcctcgaaagaacaaatcatgaactatcttattataaaaggctgtacttctactgtttgaaaaaattatttctagggtttaagtaactacaagtaaaataaatttatttcttaaaaataagtgttaaaggaataactattctatgaagcagataacattaaggtaaaatataggcttagagtatgattttaacaatgatgtaacactaggtaatggaaaactcatgtaagatgttgctagatgtttttgtttttcttaagtttgagaagtaagacataaagtttagttatacattttcccaagcacatatcctatatctaaatacataattaatgcacagttgagacagtctagtttaaaaggcttaggtccttttgtagtccataagcatggtgatttggtttcatgctcatgtgtcagatatgcttccctcaaaccttgttacagcatcatcacattacctgtttgatgtaaaaaataaaaaatagaaaggtgtaagtaaaaaaaaaaaaaaaaaa

SEQ ID NO: 122 - DNA, 3878 bp, Homo sapiens
  ref <308>: DATABASE ACCESSION NUMBER: NM_003559
ttgcgggaaagagccaaaccctggcgttggggggcccgggcggggagcccctcccgcggtccacagcgacgcctgcccagccctcctccccttccggctccggcacggggccccgaggcgttcggaggccaggcgggtttctgtcaggcccggggaggaggggcgggcggggcggccgctgcctccccgggacgggccgtaccacgcggacggggaggacggggccaggggactgcagggcggctgcaccgcccgggggcggggtgcggagcgggccggcgggctccccggggcggggcgggagggcggggcgtggggcggacggaaccaccggggcggggtgggaggtaacgggacgggcgcgaccatggcgcggtgagggagcgggggtggggatcggtccgggggaggcctgaggccgctggcttgtgcgctgtctccgccgcccccctctttcgccgccgccgccgccgccccgggcatgtcgtccaactgcaccagcaccacggcggtggcggtggcgccgctcagcgccagcaagaccaagaccaagaagaagcatttcgtgtgccagaaagtgaagctattccgggccagcgagccgatcctcagcgtcctgatgtggggggtgaaccacacgatcaatgagctgagcaatgttcctgttcctgtcatgctaatgccagatgacttcaaagcctacagcaagatcaaggtggacaatcatctcttcaataaggagaacctgcccagccgctttaagtttaaggagtattgccccatggtgttccgaaaccttcgggagaggtttggaattgatgatcaggattaccagaattcagtgacgcgcagcgcccccatcaacagtgacagccagggtcggtgtggcacgcgtttcctcaccacctacgaccggcgctttgtcatcaagactgtgtccagcgaggacgtggcggagatgcacaacatcttaaagaaataccaccagtttatagtggagtgtcatggcaacacgcttttgccacagttcctgggcatgtaccgcctgaccgtggatggtgtggaaacctacatggtggttaccaggaacgtgttcagccatcggctcactgtgcatcgcaagtatgacctcaagggttctacggttgccagagaagcgagcgacaaggagaaggccaaggacttgccaacattcaaagacaatgacttcctcaatgaagggcagaagctgcatgtgggagaggagagtaaaaagaacttcctggagaaactgaagcgggacgttgagttcttggcacagctgaagatcatggactacagcctgctggtgggcatccacgacgtggaccgggcagagcaggaggagatggaggtggaggagcgggcagaggacgaggagtgtgagaatgatggggtgggtggcaacctactctgctcctatggcacacctccggacagccctggcaacctcctcagctttcctcggttctttggtcctggggaattcgacccctctgttgacgtctatgccatgaaaagccatgaaagttcccccaagaaggaggtgtatttcatggccatcattgatatcctcacgccatacgatacaaagaagaaagctgcacatgctgccaaaacggtgaaacacggggcaggggccgagatctcgactgtgaaccctgagcagtactccaaacgcttcaacgagtttatgtccaacatcctgacgtagttctcttctaccttcagccagagccagagagctggatatggggtcggggatcgggagttagggagaagggtgtatttgggctagatgggagggtgggagcagagtcgggtttgggagggctttagcaatgagactgcagcctgtgacaccgaaagagactttagctgaagaggagggggatgtgctgtgtgtgcacctgctcacaggatgtaaccccaccttctgcttacccttgattttttctccccatttgacacccaggttaaaaaggggttccctttttggtaccttgtaaccttttaagataccttggggctagagatgacttcgtgggtttatttgggttttgtttctgaaatttcattgctccaggtttgctatttataatcatatttcatcagcctacccaccctccccatctttgctgagctctcagttcccttcaattaaagagatacccggtagacccagcacaagggtccttccagaaccaagtgctatggatgccagattggagaggtcagacacctcgccctgctgcatttgctcttgtctggattaactttgtaatttatggagtattgtgcacaacttcctccacctttcccttggattcaagtgaaaactgttgcattattcctccatcctgtctggaatacaccaggtcaacaccagagatctcagatcagaatcagagatctcagaggggaataagttcatcctcatgggatggtgaggggcaggaaagcggctgggctcttggacacctggttctcagagaaccctgtgatgatcacccaagccccaggctgtcttagcccctggagttcagaagtcctctctgtaaagcctgcctcccactaggtcaagaggaactagagtacctttggatttatcaggaccctcatgtttaaatggttatttccctttgggaaaacttcagaaactgatgtatcaaatgaggccctgtgccctcgatctatttccttcttccttctgacctcctcccaggcactcttacttctagccgaactcttagctctgggcagatctccaagcgcctggagtgctttttagcagagacacctcgttaagctccgggatgaccttgtaggagatctgtctccctgtgcctggagagttacagccagcaaggtgcccccatcttagagtgtggtgtccaaacgtgaggtggcttcctagttacatgaggatgtgatccaggaaatccagtttggaggcttgatgtgggttttgacctggcctcagccttggggctgtttttccttgttgccccgctctagacttttagcagatctgcagcccacaggcttttttggaaggagtggcttcctgcaggtgttccacctgccttcggagcctgccacccaggccctcagaactgagccacaggctgctctggccaggagagaaacagctctgttgttctgcattgggggaggtacattcctgcatcttctcaccccctcaaccaggaactggggatttgggatgagatatggtcagacttgtagataaccccaaagatgtgaagatcgcttgtgaaaccattttgaatgaatagattggtttcctgtggctccctccaaacctggccaagcccagcttccgaagcaggaaccagcactgtctctgtgcctgactcacagcatataggtcaggaaagaatggagacggcattcttggacttcactggggctgctggattggatgggaaaccttctggaagaggcagatgggggtcaaaccactgccttggccccaggaaggggccataggtaggtctgaacaactgccgcaagaccactacatgacttagggaacttgaaaccaactggctcatggagaaaacaaatttgacttgggaaagggattatgtaggaataatgtttggacttgatttccccacgtcataatgaagaatggaagtttggatctgctcctcgtcaggcgcagcatctctgaagcttggaaagctgtcttccagcagcctccgtggcctcgggttcctaccggcttctctgcatttggtctgctgatcatgttgccataatgtgtatggaaagtgtaacacattcttactggttaaagacgactaccaggtatctaacttgtttaacattga

SEQ ID NO: 123 - DNA, 3107 bp, Homo sapiens
  ref <308>: DATABASE ACCESSION NUMBER: NM_003579
cggtgagtcttggcggctgttaacgcgcgctttgggaacaggaaggttgagagagaggtgctggggtctgcgtctatctctgtcgctcttttcagcccctcctggtattcccctcctaacctgggttttttacacgcccgcgtggcttcctgctcgacctccctgagtctgatcctggtttccacctccagccctgggaaatttcctttctccagactcgccctccccacccgggcctcggactttcaccccagcttctctctcctggccagtgattacccacccccaatcccaccccgccccgccgcgcaactacctcctcccttcacccggactgggaccatcatccccactccactccgcccagtctgggactccacctgcctcctccccaatcccacactaatctctgcttggtctcttcctctttggcctaatctctcgtctcggcttattggggacggccactctcacagtttggttccaaacaccagttcctggatggattcccgccatccatgccccctctttaattagccggtcctctcagtaatgtagcagccccctctacagattagaccctggtcctacactcttagccgctgcctgcttttgacctttggctcatgggtacttgacgttttaaactcctaggcccaggatgaggaggagcttggctcccagccagctggccaagagaaaacctgaaggcaggtcctgtgatgatgaagactggcaacctggcctagtgactcctaggaaacggaaatccagcagtgagacccagatccaggagtgtttcctgtctccttttcggaaacctttgagtcagctaaccaatcaaccaccttgtctggacagcagtcagcatgaagcatttattcgaagcattttgtcaaagcctttcaaagtccccattccaaattatcaaggtcctctgggctctcgagcattgggcctgaaaagggctggggtccgccgggccctccatgaccccctggaaaaagatgccttggttctgtatgagcctcccccgctgagcgctcatgaccagctgaagcttgacaaggagaaactccctgtccatgtggttgttgaccctattctcagtaaggttttgcggcctcatcagagagagggagtgaaattcctgtgggagtgtgtcaccagtcggcgcatccctggcagccatggctgcatcatggctgatgagatgggcctaggaaagacgctgcagtgcatcacattgatgtggacacttttacgccagagtccagagtgcaagccagaaattgacaaggcagtggtggtgtcgccttccagcctggtgaagaactggtacaatgaggttgggaaatggctcggagggaggatccaacctctggccatcgatggaggatctaaggatgaaatagaccaaaagctggaaggattcatgaaccagcgtggagccagggtgtcttctcccatcctcatcatttcctatgagaccttccgccttcatgttggagtcctccagaaaggaagtgttggtctggtcatatgtgacgagggacacaggctcaagaactctgagaatcagacttaccaagccctggacagcttgaacaccagccggcgggtgctcatctccggaactcccatccagaatgatctgcttgagtatttcagcttggtacattttgttaattccggcatcctagggactgcccatgaattcaagaagcattttgaattgccaattttgaagggtcgagacgctgctgctagtgaggcagacaggcagctaggagaggagcggctgcgggagctcaccagcattgtgaatagatgcctgatacggaggacttctgatatcctttctaaatatctgcctgtgaagattgagcaggtcgtttgttgtaggctgacaccccttcagactgagttatacaagaggtttctgagacaagccaaaccggcagaagaattgcttgagggcaagatgagtgtgtcttccctttcttccatcacctcgctaaagaagctttgtaatcatccagctctaatctatgataagtgtgtggaagaggaggatggctttgtgggtgccttggacctcttccctcctggttacagctctaaggccctggagccccagctgtcaggtaagatgctggtcctggattatattctggcggtgacccgaagccgtagcagtgacaaagtagtgctggtgtcgaattacacccagactttggatctctttgagaagctgtgccgtgcccgaaggtacttatacgtccgcctggatggcacgatgtccattaagaagcgagccaaggttgtagaacgcttcaatagtccatcgagccctgactttgtcttcatgctgagcagcaaagctgggggctgtggcctcaatctcattggggctaaccggctggtcatgtttgaccctgactggaacccagccaatgatgaacaagccatggcccgggtctggcgagatggtcaaaagaagacttgctatatctaccgcctgctgtctgcagggaccattgaggagaagatcttccagcgtcagagccacaagaaggcactgagcagctgtgtggtggatgaggagcaggatgtagagcgccacttctctctgggcgagttgaaggagctgtttatcctggatgaagctagcctcagtgacacacatgacaggttgcactgccgacgttgtgtcaacagccgtcagatccggccaccccctgatggttctgactgcacttcagacctggcagggtggaaccactgcactgataagtgggggctccgggatgaggtactccaggctgcctgggatgctgcctccactgctatcaccttcgtcttccaccagcattctcatgaggaacagcggggcctccgctgataaccagctggtctgggtgtagctcttagaggaaggagatagggaaaaggggctccttgctccacagggccctgttgaattttgttctctgggagaaaatcatcaagaagggctgcatgatgtttgcccaaaatttattttataagaaaaacttttttggttaaaaaaaagaataaaggtatgaaagggttaaaaaaaaaaa

SEQ ID NO: 124 - DNA, 2346 bp, Homo sapiens
  ref <308>: DATABASE ACCESSION NUMBER: NM_003600
acaaggcagcctcgctcgagcgcaggccaatcggctttctagctagagggtttaactcctatttaaaaagaagaacctttgaattctaacggctgagctcttggaagacttgggtccttgggtcgcaggtgggagccgacgggtgggtagaccgtgggggatatctcagtggcggacgaggacggcggggacaaggggcggctggtcggagtggcggagcgtcaagtcccctgtcggttcctccgtccctgagtgtccttggcgctgccttgtgcccgcccagcgcctttgcatccgctcctgggcaccgaggcgccctgtaggatactgcttgttacttattacagctagaggcatcatggaccgatctaaagaaaactgcatttcaggacctgttaaggctacagctccagttggaggtccaaaacgtgttctcgtgactcagcaatttccttgtcagaatccattacctgtaaatagtggccaggctcagcgggtcttgtgtccttcaaattcttcccagcgcattcctttgcaagcacaaaagcttgtctccagtcacaagccggttcagaatcagaagcagaagcaattgcaggcaaccagtgtacctcatcctgtctccaggccactgaataacacccaaaagagcaagcagcccctgccatcggcacctgaaaataatcctgaggaggaactggcatcaaaacagaaaaatgaagaatcaaaaaagaggcagtgggctttggaagactttgaaattggtcgccctctgggtaaaggaaagtttggtaatgtttatttggcaagagaaaagcaaagcaagtttattctggctcttaaagtgttatttaaagctcagctggagaaagccggagtggagcatcagctcagaagagaagtagaaatacagtcccaccttcggcatcctaatattcttagactgtatggttatttccatgatgctaccagagtctacctaattctggaatatgcaccacttggaacagtttatagagaacttcagaaactttcaaagtttgatgagcagagaactgctacttatataacagaattggcaaatgccctgtcttactgtcattcgaagagagttattcatagagacattaagccagagaacttacttcttggatcagctggagagcttaaaattgcagattttgggtggtcagtacatgctccatcttccaggaggaccactctctgtggcaccctggactacctgccccctgaaatgattgaaggtcggatgcatgatgagaaggtggatctctggagccttggagttctttgctatgaatttttagttgggaagcctccttttgaggcaaacacataccaagagacctacaaaagaatatcacgggttgaattcacattccctgactttgtaacagagggagccagggacctcatttcaagactgttgaagcataatcccagccagaggccaatgctcagagaagtacttgaacacccctggatcacagcaaattcatcaaaaccatcaaattgccaaaacaaagaatcagctagcaaacagtcttaggaatcgtgcagggggagaaatccttgagccagggctgccatataacctgacaggaacatgctactgaagtttattttaccattgactgctgccctcaatctagaacgctacacaagaaatatttgttttactcagcaggtgtgccttaacctccctattcagaaagctccacatcaataaacatgacactctgaagtgaaagtagccacgagaattgtgctacttatactggttcataatctggaggcaaggttcgactgcagccgccccgtcagcctgtgctaggcatggtgtcttcacaggaggcaaatccagagcctggctgtggggaaagtgaccactctgccctgaccccgatcagttaaggagctgtgcaataaccttcctagtacctgagtgagtgtgtaacttattgggttggcgaagcctggtaaagctgttggaatgagtatgtgattctttttaagtatgaaaataaagatatatgtacagacttgtattttttctctggtggcattcctttaggaatgctgtgtgtctgtccggcaccccggtaggcctgattgggtttctagtcctccttaaccacttatctcccatatgagagtgtgaaaaataggaacacgtgctctacctccatttagggatttgcttgggatacagaagaggccatgtgtctcagagctgttaagggcttatttttttaaaacattggagtcatagcatgtgtgtaaactttaaatatgcaaataaataagtatctatgtctaaaaaaa

SEQ ID NO: 125 - DNA, 5227 bp, Homo sapiens
  ref <308>: DATABASE ACCESSION NUMBER: NM_003626
gctcctcctccgctccgccagtgtccggccgcgggccggccttagtgactggggcggcgggccccggggccgcggcgtggggcgggcaggcggacgccggccgcgggctgctttcgtcggctcccaagctctcccggagcgagcagccgcccgcgagccgccgcggagcctcctcgcccgctcccgccggcgagcaagatgatgtgcgaggtgatgccgaccatcagcgaagcagaaggcccccctggaggaggtggaggccatggttccggctccccttcacagccagatgcagattcacattttgaacagttgatggtctccatgctagaagaaagggaccgccttcttgatacactgagagagactcaagaaacgctggccttaacccaggggaagttacacgaggttggtcatgaaagagattccttgcagagacagctcaacacggcacttccacaggagttcgcagcacttactaaagaactcaatgtatgcagggaacagctccttgaaagggaagaagaaattgctgaactgaaagcagaaaggaataacaccaggctgctgttagagcatttggaatgccttgtctccaggcatgagcggtctcttaggatgaccgtggtgaagagacaagcgcagtctccagcaggcgtgtccagcgaagtggaagtgctgaaagcactgaagtccttatttgaacaccacaaagctctggatgaaaaggtgagagagcgattacgagtagcacttgaaagatgtagtttgttagaagaggaattaggtgccacacacaaagagctaatgattcttaaagaacagaataatcagaaaaaaactctaacagatggagtgctggacataaaccatgaacaagaaaatacaccaagcacgagtggaaagagatcttctgatggttctttaagccacgaggaagaccttgctaaagtaattgagctccaagaaatcataagtaagcagtcaagggaacagagccaaatgaaagaacgcctggcttccctttccagtcatgtgacagaactggaagaggatctggacacggctagaaaagatctcatcaaatctgaagaaatgaacacaaaattgcaacgagatgtccgtgaagccatggcccaaaaggaagatatggaagagagaatcactactcttgaaaaacgctacctcgctgcacagcgtgaagccacatctgtgcatgacctcaatgataaacttgaaaatgaaattgcaaataaagattctatgcatcgacagactgaagataaaaaccgccagttacaggagcgcttggaattggcagagcaaaagctgcaacagacactgaggaaggcagagacgctcccggaggtggaggcggagctggcccagagggtggcagcgctttccaaggctgaagagagacacggcaacattgaagaaaggttacgacagatggaagcacagttggaggagaagaatcaagaactgcagcgggcaaggcaaagagaaaaaatgaacgaagaacataataaacgtttatcagacactgttgacaagctgctttcagaatctaatgagaggcttcaacttcatcttaaagagagaatggctgctttggaagataagaactctcttttaagagaagttgaaagtgcaaaaaagcagttagaagaaacacaacacgataaggatcagcttgtcctaaacattgaagcactgagggctgaactagaccacatgagactaagaggtgcttcacttcatcatggccgaccccacttgggcagtgtcccagatttcaggttccccatggcagacggccacacagactcctacagcaccagtgcagtgctgcggcgcccacagaaaggccggctggcagccctgcgagatgagccttccaaggtacaaactcttaatgagcaggattgggaacgtgcccagcaagctagtgtcttggcaaatgtagcacaagcattcgagagtgatgctgacgtgtctgatggtgaagatgacagggacactctcctcagctcagttgacctgctatcgcccagcgggcaggccgacgcgcacacactagccatgatgcttcaggagcagctggacgccatcaacaaagagatcaggttgattcaggaagaaaaagaaaatacagagcagcgggcagaggagattgaaagtcgagttggcagtggaagtctagacaatcttggtcgttttagatcaatgagctccattcccccctaccctgcttcctcgcttgctagctcctcccctccgggcagtgggcgctccaccccacgaaggatccctcacagcccagctcgggaagtggacagactgggcgtcatgacccttttgccaccttccagagaagaggtacgagatgacaagacaaccataaagtgtgaaacctccccgccttcctccccgagagcccttcggttagaccggctgcacaaaggggcgctgcacaccgtcagccacgaggacatcagggacataaggaactccacaggctcccaggatggtcccgtgagcaaccccagcagtagcaacagtagccaggactcgctccacaaagccccaaagaagaaaggcattaagtcctccattggccgcttgtttggcaagaaagaaaagggccgacctggacaaactggcaaagaagcattaggacaagctggtgtttccgagacggataactcatctcaggatgccttgggacttagcaaattggggggacaggctgaaaaaaatcgtaaacttcaaaaaaagcatgaattgctggaggaagcccggagacaaggtttaccttttgcccaatgggacgggccaacggttgtggtctggctagagctctgggttgggatgccagcctggtatgtggctgcctgccgagcaaacgtgaaaagcggggccatcatgtcggccctgtccgacacagagatccagcgtgagattggcatcagcaaccccctgcacaggctgaagctgaggctggccatccaggagatcatgtcgctgaccagcccgtctgccccgcccacatctagaacgacactcgcctatggggacatgaaccacgagtggatcggcaacgagtggctccccagcctgggcctcccccagtaccgcagctacttcatggagtgccttgtagacgccaggatgctggaccacttgaccaagaaagaccttcgagggcagctgaaaatggtcgacagttttcacagaaacagtttccagtgtggaattatgtgcctgagaaggttaaattatgaccggaaagaactggaaagaaaaagagaagaaagtcagagtgaaataaaagacgtgcttgtttggagcaatgatcgagtgattcgctggatcctgtcaattggccttaaagaatatgcaaacaatcttatagagagtggtgttcacggagcacttctggccttagatgaaaccttcgacttcagtgcactggcactgctgttacagatcccgacgcagaacacacaggctcgtgctgtcttggaaagagaatttaacaaccttttggtcatggggactgatagaaggtttgatgaagatgatgataaaagctttaggagagcaccttcatggagaaaaaagtttagaccaaaggacattcgtggcttagctgctgggtcagcagagactctccctgcaaacttccgggtgacttcttctatgtcttccccctctatgcagccaaagaagatgcagatggacggcaatgtatcaggaacacagaggttggattctgctacagtcaggacttactcctgctaaagtctcctgttgtttacccacactacttctacagatgattatgcagcatttgaatccaacaaagactacattttggaatccagtggaatctttaatcttgttaatacttgttatatggaccctaagatattttattacagagtttttaattagtgaaaaattcatgaataccatagagaaaatattttagaatttaatgtttcttatatttatgtaaacttatgactcttcatttatatagttacttactttttcatgtatatccaggctataaatatcctttcaaatcatgttcttatacctaattttagtctttcaaatgaatgtactgtaatgcttgtatgtataaatcctatgaatagagggcttttgtaaattatgcatttattgtaattatcattaattttttaatgataaaccatgacaaaggattttacgtttataaaattatgacagaagccatgtgcattatcctttacggacgcagcctagctctacagcaatcatcctgaaataagcatacctaatttcaagcaattgttgtattttcatgactgaccttaactgtactttttctagcaagagatgctttattctgcagcatgaacagatttaaaatggctggtgttaaatatcagctcctaataagatgtggactgaaaacactatcacaacactatgagaagcccctagcactggttaacgctttcctagcctagtctctggatttggggagcttgtcttcagtggctgagactgtgagctgggagcagttctctcagctggagagactcgggatggggtaacctggggaccagtctagcccctgcaccctcttccctgcctctgctccttgggagcgggtggagagacacccatgtggctccccttagggccagcaccaagcaccacgctctcatcctgcaagtcggcgcacacagtggatgaaggcaggagacccagaaagcagtgcagtgcagctctaataaaggccttatttttcttatgtaaatcatctttttacatttgtttgtaaacatgtttaaagaacgaacctagtgggacatttttagactttgatgctctagccattttggattgtgtaagttgcagatgtggcttttactttttaaatggcatattaacaagccagcaaagtgtgtcagaccatggcgtggtatttattgtgcagcagatccagagacagaggcagcctgtcttttcagttggtttctgcttttaatttacttgtacaattcattgttactgttctgtttttctattaatcttttgtcaacttcctgattatgtaacaaagtatgtacagtctacttttgaactatttttatcacagtattatttattgctttctttcaataaagtactgaagcattttccactgccaaaaaaaaaaaaaaaa

SEQ ID NO: 126 - DNA, 3138 bp, Homo sapiens
  ref <308>: DATABASE ACCESSION NUMBER: NM_003686
cccgtgttctgcgttgccggccgtgggtgctctggccacagtgagttaggggcgtcggagcgggtttctccaaccgcaatcggctccgctcaaggggaggaggagagtcccttctcggaaggcctaaggaaacgtgtcgtctggaatgggcttgggggccacgcctgcacatctccgcgagacagagggataaagtgaagatggtgctgttattgttacctcgagtgccacatgcgacctctgagatatgtacacagtcattcttactatcgcactcagccattcttactacgctaaagaagaaataattattcgaggatatttgcctggcccagaagaaacttatgtaaatttcatgaactattatatccgttttcctcggagtgagagaaaactctttttagatatcatctgagaggtagttaatttggcaccatggggatacagggattgctacaatttatcaaagaagcttcagaacccatccatgtgaggaagtataaagggcaggtagtagctgtggatacatattgctggcttcacaaaggagctattgcttgtgctgaaaaactagccaaaggtgaacctactgataggtatgtaggattttgtatgaaatttgtaaatatgttactatctcatgggatcaagcctattctcgtatttgatggatgtactttaccttctaaaaaggaagtagagagatctagaagagaaagacgacaagccaatcttcttaagggaaagcaacttcttcgtgaggggaaagtctcggaagctcgagagtgtttcacccggtctatcaatatcacacatgccatggcccacaaagtaattaaagctgcccggtctcagggggtagattgcctcgtggctccctatgaagctgatgcgcagttggcctatcttaacaaagcgggaattgtgcaagccataattacagaggactcggatctcctagcttttggctgtaaaaaggtaattttaaagatggaccagtttggaaatggacttgaaattgatcaagctcggctaggaatgtgcagacagcttggggatgtattcacggaagagaagtttcgttacatgtgtattctttcaggttgtgactacctgtcatcactgcgtgggattggattagcaaaggcatgcaaagtcctaagactagccaataatccagatatagtaaaggttatcaagaaaattggacattatctcaagatgaatatcacggtaccagaggattacatcaacgggtttattcgggccaacaataccttcctctatcagctagtttttgatcccatcaaaaggaaacttattcctctgaacgcctatgaagatgatgttgatcctgaaacactaagctacgctgggcaatatgttgatgattccatagctcttcaaatagcacttggaaataaagatataaatacttttgaacagatcgatgactacaatccagacactgctatgcctgcccattcaagaagtcatagttgggatgacaaaacatgtcaaaagtcagctaatgttagcagcatttggcataggaattactctcccagaccagagtcgggtactgtttcagatgccccacaattgaaggaaaatccaagtactgtgggagtggaacgagtgattagtactaaagggttaaatctcccaaggaaatcatccattgtgaaaagaccaagaagtgcagagctgtcagaagatgacctgttgagtcagtattctctttcatttacgaagaagaccaagaaaaatagctctgaaggcaataaatcattgagcttttctgaagtgtttgtgcctgacctggtaaatggacctactaacaaaaagagtgtaagcactccacctaggacgagaaataaatttgcaacatttttacaaaggaaaaatgaagaaagtggtgcagttgtggttccagggaccagaagcaggtttttttgcagttcagattctactgactgtgtatcaaacaaagtgagcatccagcctctggatgaaactgctgtcacagataaagagaacaatctgcatgaatcagagtatggagaccaagaaggcaagagactggttgacacagatgtagcacgtaattcaagtgatgacattccgaataatcatattccaggtgatcatattccagacaaggcaacagtgtttacagatgaagagtcctactcttttgagagcagcaaatttacaaggaccatttcaccacccactttgggaacactaagaagttgttttagttggtctggaggtcttggagatttttcaagaacgccgagcccctctccaagcacagcattgcagcagttccgaagaaagagcgattcccccacctctttgcctgagaataatatgtctgatgtgtcgcagttaaagagcgaggagtccagtgacgatgagtctcatcccttacgagaaggggcatgttcttcacagtcccaggaaagtggagaattctcactgcagagttcaaatgcatcaaagctttctcagtgctctagtaaggactctgattcagaggaatctgattgcaatattaagttacttgacagtcaaagtgaccagacctccaagctatgtttatctcatttctcaaaaaaagacacacctctaaggaacaaggttcctgggctatataagtccagttctgcagactctctttctacaaccaagatcaaacctctaggacctgccagagccagtgggctgagcaagaagccggcaagcatccagaagagaaagcatcataatgccgagaacaagccggggttacagatcaaactcaatgagctctggaaaaactttggatttaaaaaattctgaaaagcttcctccttgtaagaaacccctgtccccagtcagagataacatccaactaactccagaagcggaagaggatatatttaacaaacctgaatgtggccgtgttcaaagagcaatattccagtaaatgcagactgctgcaaagcttttgcctgcaagagaatctgatcaatttgaagtccctgtttgggaatgaggcacttatcagcatgaagaattttttctcattctgtgccattttaaaaatagaatacattttgtatattaactttaaaaaaaaaaaaaaaaaaa

SEQ ID NO: 127 - DNA, 4932 bp, Homo sapiens
  ref <308>: DATABASE ACCESSION NUMBER: NM_003722
cccggctttatatctatatatacacaggtatatgtgtatattttatataattgttctccgttcgttgatatcaaagacagttgaaggaaatgaattttgaaacttcacggtgtgccaccctacagtactgccctgacccttacatccagcgtttcgtagaaaccccagctcatttctcttggaaagaaagttattaccgatccaccatgtcccagagcacacagacaaatgaattcctcagtccagaggttttccagcatatctgggattttctggaacagcctatatgttcagttcagcccattgacttgaactttgtggatgaaccatcagaagatggtgcgacaaacaagattgagattagcatggactgtatccgcatgcaggactcggacctgagtgaccccatgtggccacagtacacgaacctggggctcctgaacagcatggaccagcagattcagaacggctcctcgtccaccagtccctataacacagaccacgcgcagaacagcgtcacggcgccctcgccctacgcacagcccagctccaccttcgatgctctctctccatcacccgccatcccctccaacaccgactacccaggcccgcacagtttcgacgtgtccttccagcagtcgagcaccgccaagtcggccacctggacgtattccactgaactgaagaaactctactgccaaattgcaaagacatgccccatccagatcaaggtgatgaccccacctcctcagggagctgttatccgcgccatgcctgtctacaaaaaagctgagcacgtcacggaggtggtgaagcggtgccccaaccatgagctgagccgtgaattcaacgagggacagattgcccctcctagtcatttgattcgagtagaggggaacagccatgcccagtatgtagaagatcccatcacaggaagacagagtgtgctggtaccttatgagccaccccaggttggcactgaattcacgacagtcttgtacaatttcatgtgtaacagcagttgtgttggagggatgaaccgccgtccaattttaatcattgttactctggaaaccagagatgggcaagtcctgggccgacgctgctttgaggcccggatctgtgcttgcccaggaagagacaggaaggcggatgaagatagcatcagaaagcagcaagtttcggacagtacaaagaacggtgatggtacgaagcgcccgtttcgtcagaacacacatggtatccagatgacatccatcaagaaacgaagatccccagatgatgaactgttatacttaccagtgaggggccgtgagacttatgaaatgctgttgaagatcaaagagtccctggaactcatgcagtaccttcctcagcacacaattgaaacgtacaggcaacagcaacagcagcagcaccagcacttacttcagaaacagacctcaatacagtctccatcttcatatggtaacagctccccacctctgaacaaaatgaacagcatgaacaagctgccttctgtgagccagcttatcaaccctcagcagcgcaacgccctcactcctacaaccattcctgatggcatgggagccaacattcccatgatgggcacccacatgccaatggctggagacatgaatggactcagccccacccaggcactccctcccccactctccatgccatccacctcccactgcacacccccacctccgtatcccacagattgcagcattgtcagtttcttagcgaggttgggctgttcatcatgtctggactatttcacgacccaggggctgaccaccatctatcagattgagcattactccatggatgatctggcaagtctgaaaatccctgagcaatttcgacatgcgatctggaagggcatcctggaccaccggcagctccacgaattctcctccccttctcatctcctgcggaccccaagcagtgcctctacagtcagtgtgggctccagtgagacccggggtgagcgtgttattgatgctgtgcgattcaccctccgccagaccatctctttcccaccccgagatgagtggaatgacttcaactttgacatggatgctcgccgcaataagcaacagcgcatcaaagaggagggggagtgagcctcaccatgtgagctcttcctatccctctcctaactgccagccccctaaaagcactcctgcttaatcttcaaagccttctccctagctcctccccttcctcttgtctgatttcttaggggaaggagaagtaagaggctacctcttacctaacatctgacctggcatctaattctgattctggctttaagccttcaaaactatagcttgcagaactgtagctgccatggctaggtagaagtgagcaaaaaagagttgggtgtctccttaagctgcagagatttctcattgacttttataaagcatgttcacccttatagtctaagactatatatataaatgtataaatatacagtatagatttttgggtggggggcattgagtattgtttaaaatgtaatttaaatgaaagaaaattgagttgcacttattgaccattttttaatttacttgttttggatggcttgtctatactccttcccttaaggggtatcatgtatggtgataggtatctagagcttaatgctacatgtgagtgacgatgatgtacagattctttcagttctttggattctaaatacatgccacatcaaacctttgagtagatccatttccattgcttattatgtaggtaagactgtagatatgtattcttttctcagtgttggtatattttatattactgacatttcttctagtgatgatggttcacgttggggtgatttaatccagttataagaagaagttcatgtccaaacgtcctctttagtttttggttgggaatgaggaaaattcttaaaaggcccatagcagccagttcaaaaacacccgacgtcatgtatttgagcatatcagtaacccccttaaatttaataccagataccttatcttacaatattgattgggaaaacatttgctgccattacagaggtattaaaactaaatttcactactagattgactaactcaaatacacatttgctactgttgtaagaattctgattgatttgattgggatgaatgccatctatctagttctaacagtgaagttttactgtctattaatattcagggtaaataggaatcattcagaaatgttgagtctgtactaaacagtaagatatctcaatgaaccataaattcaactttgtaaaaatcttttgaagcatagataatattgtttggtaaatgtttcttttgtttggtaaatgtttcttttaaagaccctcctattctataaaactctgcatgtagaggcttgtttacctttctctctctaaggtttacaataggagtggtgatttgaaaaatataaaattatgagattggttttcctgtggcataaattgcatcactgtatcattttcttttttaaccggtaagagtttcagtttgttggaaagtaactgtgagaacccagtttcccgtccatctcccttagggactacccatagacatgaaaggtccccacagagcaagagataagtctttcatggctgctgttgcttaaaccacttaaacgaagagttcccttgaaactttgggaaaacatgttaatgacaatattccagatctttcagaaatataacacatttttttgcatgcatgcaaatgagctctgaaatcttcccatgcattctggtcaagggctgtcattgcacataagcttccattttaattttaaagtgcaaaagggccagcgtggctctaaaaggtaatgtgtggattgcctctgaaaagtgtgtatatattttgtgtgaaattgcatactttgtattttgattattttttttttcttcttgggatagtgggatttccagaaccacacttgaaacctttttttatcgtttttgtattttcatgaaaataccatttagtaagaataccacatcaaataagaaataatgctacaattttaagaggggagggaagggaaagtttttttttattatttttttaaaattttgtatgttaaagagaatgagtccttgatttcaaagttttgttgtacttaaatggtaataagcactgtaaacttctgcaacaagcatgcagctttgcaaacccattaaggggaagaatgaaagctgttccttggtcctagtaagaagacaaactgcttcccttactttgctgagggtttgaataaacctaggacttccgagctatgtcagtactattcaggtaacactagggccttggaaattcctgtactgtgtctcatggatttggcactagccaaagcgaggcacccttactggcttacctcctcatggcagcctactctccttgagtgtatgagtagccagggtaaggggtaaaaggatagtaagcatagaaaccattagaaagtgggcttaatggagttcttgtggcctcagctcaatgcagttagctgaagaattgaaaagtttttgtttggagacgtttataaacagaaatggaaagcagagttttcattaaatccttttaccttttttttttcttggtaatcccctaaaataacagtatgtgggatattgaatgttaaagggatatttttttctattatttttataattgtacaaaattaagcaaatgttaaaagttttatatgctttattaatgttttcaaaaggtattatacatgtgatacattttttaagcttcagttgcttgtcttctggtactttctgttatgggcttttggggagccagaagccaatctacaatctctttttgtttgccaggacatgcaataaaatttaaaaaataaataaaaactaattaagaaaaaaaaaaaaaaaaaaaaaaaaaaaaa

SEQ ID NO: 128 - DNA, 1873 bp, Homo sapiens
  ref <308>: DATABASE ACCESSION NUMBER: NM_003824
gacgatacgccgggcgcaggcgcagaagccgcgcccgtccgcggcgccgccagccagggcggaaacggctgcggcttcgctagggacgcatgcgcgggtcccttagttttcgcgagataacggtcgaaaacgcgctcttgtcgatttcctgtagtgaatcaggcaccggagtgcaggttcgggggtggaatccttgggccgctgggcaagcggcgagacctggccagggccagcgagccgaggacagagggcgcacggagggccgggccgcagccccggccgcttgcagaccccgccatggacccgttcctggtgctgctgcactcggtgtcgtccagcctgtcgagcagcgagctgaccgagctcaagttcctatgcctcgggcgcgtgggcaagcgcaagctggagcgcgtgcagagcggcctagacctcttctccatgctgctggagcagaacgacctggagcccgggcacaccgagctcctgcgcgagctgctcgcctccctgcggcgccacgacctgctgcggcgcgtcgacgacttcgaggcgggggcggcggccggggccgcgcctggggaagaagacctgtgtgcagcatttaacgtcatatgtgataatgtggggaaagattggagaaggctggctcgtcagctcaaagtctcagacaccaagatcgacagcatcgaggacagatacccccgcaacctgacagagcgtgtgcgggagtcactgagaatctggaagaacacagagaaggagaacgcaacagtggcccacctggtgggggctctcaggtcctgccagatgaacctggtggctgacctggtacaagaggttcagcaggcccgtgacctccagaacaggagtggggccatgtccccgatgtcatggaactcagacgcatctacctccgaagcgtcctgatgggccgctgctttgcgctggtggaccacaggcatctacacagcctggactttggttctctccaggaaggtagcccagcactgtgaagacccagcaggaagccaggctgagtgagccacagaccacctgcttctgaactcaagctgcgtttattaatgcctctcccgcaccaggccgggcttgggccctgcacagatatttccatttcttcctcactatgacactgagcaagatcttgtctccactaaatgagctcctgcgggagtagttggaaagttggaaccgtgtccagcacagaaggaatctgtgcagatgagcagtcacactgttactccacagcggaggagaccagctcagaggcccaggaatcggagcgaagcagagaggtggagaactgggatttgaacccccgccatccttcaccagagcccatgctcaaccactgtggcgttctgctgcccctgcagttggcagaaaggatgttttgtcccatttccttggaggccaccgggacagacctggacactagggtcaggcggggtgcgtggtggggagaggcatggctggggtgggggtggggagacctggttggccgtggtccagctcttggcccctgtgtgagttgagtctcctctctgagactgctaagtaggggcagtgatggttgccaggacgaattgagataatatctgtgaggtgctgatgagtgattgacacacagcactctctaaatcttccttgtgaggattatgggtcctgcaattctacagtttcttactgttttgtatcaaaatcactatctttctgataacagaattgccaaggcagcgggatctcgtatctttaaaaagcagtcctcttattcctaaggtaatcctattaaaacacagctttacaacttccatatcacaaaaaaaaaaaaaaaaaaaaaaaaaaaaaaaaaaaaaaa

SEQ ID NO: 129 - DNA, 1546 bp, Homo sapiens
  ref <308>: DATABASE ACCESSION NUMBER: NM_003862
cacggccggagagacgcggaggaggagacatgagccggcgggcgcccagacggagcggccgtgacgctttcgcgctgcagccgcgcgccccgaccccggagcgctgacccctggccccacgcagctccgcgcccgggccggagagcgcaactcggcttccagacccgccgcgcatgctgtccccggactgagccgggcagccagcctcccacggacgcccggacggccggccggccagcagtgagcgagcttccccgcaccggccaggcgcctcctgcacagcggctgccgccccgcagcccctgcgccagcccggagggcgcagcgctcgggaggagccgcgcggggcgctgatgccgcagggcgcgccgcggagcgccccggagcagcagagtctgcagcagcagcagccggcgaggagggagcagcagcagcggcggcggcggcggcggcggcggcggaggcgcccggtcccggccgcgcggagcggacatgtgcaggctgggctaggagccgccgcctccctcccgcccagcgatgtattcagcgccctccgcctgcacttgcctgtgtttacacttcctgctgctgtgcttccaggtacaggtgctggttgccgaggagaacgtggacttccgcatccacgtggagaaccagacgcgggctcgggacgatgtgagccgtaagcagctgcggctgtaccagctctacagccggaccagtgggaaacacatccaggtcctgggccgcaggatcagtgcccgcggcgaggatggggacaagtatgcccagctcctagtggagacagacaccttcggtagtcaagtccggatcaagggcaaggagacggaattctacctgtgcatgaaccgcaaaggcaagctcgtggggaagcccgatggcaccagcaaggagtgtgtgttcatcgagaaggttctggagaacaactacacggccctgatgtcggctaagtactccggctggtacgtgggcttcaccaagaaggggcggccgcggaagggccccaagacccgggagaaccagcaggacgtgcatttcatgaagcgctaccccaaggggcagccggagcttcagaagcccttcaagtacacgacggtgaccaagaggtcccgtcggatccggcccacacaccctgcctaggccaccccgccgcggcccctcaggtcgccctggccacactcacactcccagaaaactgcatcagaggaatatttttacatgaaaaataaggaagaagctctatttttgtacattgtgtttaaaagaagacaaaaactgaaccaaaactcttggggggaggggtgataaggattttattgttgacttgaaacccccgatgacaaaagactcacgcaaagggactgtagtcaacccacaggtgcttgtctctctctaggaacagacaactctaaactcgtccccagaggaggacttgaatgaggaaaccaacactttgagaaaccaaagtcctttttcccaaaggttctgaaaggaaaaaaaaaaaaaaacaaaaaaaaaaaaaaaa

SEQ ID NO: 130 - DNA, 1125 bp, Homo sapiens
  ref <308>: DATABASE ACCESSION NUMBER: NM_003864
cccccatgtgacagtgacggggtccccgctccaggagacgctcgagtctgcgtcccggccctcagcactgtccactgtttcggtgccagcagagaccagcaggcccgggacagttggtgtttggccgtgccgctgtctaacttggtgtgcagagtgaattgccgctgccggagcggagagaggcggagcggccaggagagaggggatttctgtcagcgccggcctcgggagctcggagacatgaacggcttcacgcctgacgagatgagccgcggcggggatgcggccgccgcagtggccgcagtggtcgctgccgcggccgccgccgcctcggcggggaacgggaccggcgcgggcaccggggctgaggtgccgggcgcgggggcggtctcagcggctgggcccccgggggcggccgggccgggccccgggcaactgtgctgcctgcgggaggatggtgagcggtgcggccgggcggcaggcaacgccagcttcagcaagaggatccagaagagcatctcccagaagaaggtgaagatcgagctggataagagcgcaaggcatctttacatatgtgattatcataaaaacttaattcagagtgttcgaaacagaagaaagagaaaagggagtgatgatgatggaggtgattcacctgttcaagatattgataccccagaggttgatttataccaattacaagtaaatacacttaggagatacaaaagacacttcaagctaccaaccagaccaggacttaataaagcacaacttgttgagatagttggttgccactttaggtctattccagtgaatgaaaaagacaccttaacatatttcatctactcagtgaagaatgacaagaacaaatcagatctcaaggttgatagtggtgttcactaggagacgtggaattgagactaataacttggatgttaacactgtttactgttttttcacatgtagaaatgttctttgtgtattttttctacagaggattttctctgattttattttctttgtttctgactctaataattagttggaaactcatataaaatgagctttcctaaattaaatctattttaaataaaggttattactattaaaaaaaaaaaaaaaaaa

SEQ ID NO: 131 - DNA, 1411 bp, Homo sapiens
  ref <308>: DATABASE ACCESSION NUMBER: NM_003956
agctgccttgcacagcctcgcaatgagctgccacaactgctccgacccccaggtcctttgcagctccgggcagctgttcctgcagcccctctgggaccacctgaggagctgggaggccctcctacagtcgcccttcttcccggtcatcttctccatcaccacatacgtgggcttttgcctgcccttcgtggtcctggatatcctgtgctcctgggtgcccgccctgcggcgctacaagatccaccctgacttctcgccatccgcgcagcagctgctaccttgcctggggcagaccctctaccagcatgtgatgtttgtgttccccgtgacgctgctgcattgggcccgcagcccggccctcctgccccacgaagctcccgagctgctcctgctgctgcaccacatcctgttctgcctgctactcttcgacatggagttcttcgtgtggcacctgctgcaccacaaggtgccctggctgtaccgcaccttccacaaggtgcaccaccagaactcgtcctcgttcgcgctggcaacgcagtatatgagcgtctgggaactgttttctttgggcttcttcgacatgatgaacgtcacactgctcgggtgccacccgctcaccaccctgaccttccacgtggtcaacatctggctttccgtggaggaccactccggctacaacttcccttggtccactcacagactggtgcccttcgggtggtacgggggtgtggtgcaccacgacctgcatcactctcactttaactgcaacttcgctccgtactttacacactgggacaaaatactgggaacgctgcggactgcatctgtcccagcgcggtgatgtggctgcggtgggtgcccctaagactcgggactgctgtgcctttcacacttgaatgaagagaaacacctgagctatatatttttttaaagcaactaacttattgctttatgtttatctatgaaaaccatagataaaatctgatgcatttttgtaatctgacaaagtaatttacatactgtttgtgtatcaatacaattttgtgttcttggtattcttagtctagctcacctcaatagccttgaatcctgcatatgaattagacattcatcactggcatatttagaatatctctaaaaggacttgtttgtagaataaggaattttctatgtttcaaagtgttctaaaacctggctaaaagaatgtatttttgtggatggtgttgacttctgactctaaaagcaatcaaacatgtttctgctggacagtgaccaagaattatagtaccttcttatatttttttatagaactgtatatttattttgaaagaaatgttattcgtgctttaaaaaggaaaaaaaaccatgaatcaaataaaagaaaaaaaaaaaaaaaaaaaaaaaaaaaaaa

SEQ ID NO: 132 - DNA, 4939 bp, Homo sapiens
  ref <308>: DATABASE ACCESSION NUMBER: NM_003970
ttctctctcctccttgcaattttcctttctgtctgggagcacgccaagatgtcccttgtgactgtccccttctaccagaagagacataggcacttcgaccagtcctaccgtaatattcaaacacggtacctgctggacgaatatgcgtcaaaaaagcgagcttccacccaggcatcttcccagaagtccttgagtcagcggtcgtcttcacagagagcctccagccagacgtccctgggaggaaccatctgcagggtctgtgcgaagcgagtgagcacgcaggaagatgaggagcaggagaacagaagcaggtaccagtccctggtggccgcctatggtgaggccaagcgacacggcttcctcagcgagctggcccacttggaggaggatgtccacctggcacgctcccaggcccgcgacaagctggacaaatacgccattcagcagatgatggaggacaagctggcctgggagagacacacatttgaagagcggataagcagggctcctgagatcctggtgcggctgcgatcccacaccgtctgggagaggatgtctgtgaaactctgcttcaccgtgcaaggatttcccacgcccgtggtgcagtggtacaaagatggcagtctgatttgccaggcggctgaaccgggaaagtacaggattgagagcaactatggcgtacacacactggagatcaacagggcagactttgacgacactgcgacatactcagcagtggccaccaatgcccacggacaagtgtccaccaacgcggcggtggtggtgagaaggttccggggagacgaggaaccattccgttcggtgggactcccgattggattgcccctgtcatcgatgattccgtacacgcacttcgacgtccagtttttggagaagtttggggtcaccttcaggagggaaggcgagacggtcactctcaagtgcaccatgctggtgacgccggacctgaagcgggtgcagccgcgcgccgagtggtaccgcgatgacttgctgttgaaagagtccaagtggacgaagatgttctttggagaaggccaggcctccctgtccttcagccacctgcacaaggacgacgagggcctgtacaccctgcgcatcgtgtctcggggcggcgtcacggaccacagcgccttcctgtttgtcagagatgctgacccgctggtcacaggggcccccggtgcacccatggacttgcagtgccacgacgccaaccgggactacgtcatcgtgacctggaagccgcccaacaccaccactgagagccccgtcatgggctattttgtggaccgatgtgaagtaggaacgaataattgggtgcagtgcaatgatgcaccggtgaaaatctgcaaatacccggtcacagggctttttgaaggaaggtcttacatattccgagtgagggcagtgaacagtgcgggcatcagccgaccctccagggtctctgatgcggtggctgcacttgaccccttggacctcagaaggttacaagccgttcatttggagggagagaaggagattgccatttatcaggatgaccttgaaggtgacgcccaggttccagggcctcccaccggtgtgcacgcttccgagatcagcagaaactatgtcgtcctcagctgggagccacccactccccgtggcaaggacccgctcatgtacttcattgagaagtcggtggtggggagcggcacgtggcagagagtcaacgcccagacggctgtgagatccccgagatatgccgtgtttgacctcatggaagggaagtcttatgtgttccgagtgctgtcagcaaaccggcatggcctgagcgaaccttcggagataacgtcccccattcaggcccaggatgtgaccgttgtcccttctgctccgggtcgggttcttgcttcccgaaacaccaagacgtcggtggtggtgcagtgggaccgacctaagcatgaggaggacctgctgggctactacgtggactgctgtgtggccggaaccaacctctgggagccctgcaaccacaagcccatcggatacaacaggttcgtggtgcacggcttaaccacgggagagcagtacatcttccgagtcaaggcggtcaatgctgtggggatgagtgaaaattcccaggaatcagacgtcataaaagtgcaggccgcactcaccgtcccgtcccatccttatgggattacgctcctcaactgtgacggccactccatgaccctcggctggaaggtcccgaaattcagtggtggctcgcccatcctgggctactacctggacaagcgtgaagttcaccataaaaactggcacgaggtcaattcctcacccagcaaaccgacaatcctaacggtggacggcttgacggaaggctcactctacgagttcaaaatcgccgccgtcaacctggccggcatcggggagccctcagatcccagtgagcacttcaagtgtgaggcctggaccatgccggagcccggtcctgcctacgacttgacgttctgtgaggtcagggacacgtccttggtcatgctgtggaaggcccctgtgtactccggcagcagccctgtttctggatatttcgtggacttcagggaggaggatgctggagagtggatcactgtcgatcagacgacaacagccagccgttatttaaaggtctctgacctgcagcaaggtaagacctatgtcttcagggtccgggcagtcaatgcaaatggcgtggggaagccctcagacacgtcggagcctgtgctggtagaggcgagaccaggcaccaaggaaatcagtgctggtgtcgatgaacagggcaacatctatctgggcttcgactgccaggaaatgacagacgcgtctcagttcacctggtgtaaatcctacgaggagatttcagatgatgagaggtttaaaatcgaaaccgtgggggatcactccaagctgtacttaaagaatccggataaggaggatttagggacttactccgtgtctgtaagtgatacagacggagtgtcctccagttttgttctggacccagaagagctcgagcgtttgatggcattgagcaatgaaataaagaaccccacaattcctctgaaatcggaattagcttatgagatttttgataaggggcgggttcgcttctggctccaggctgagcacttatcaccagatgccagctaccgatttattattaatgacagagaagtctctgacagcgagatacacagaattaaatgtgacaaagctactggcattattgagatggtgatggatcgatttagtattgaaaatgaggggacctacactgtgcagattcatgatgggaaagccaaaagtcagtcttctctagttcttattggagatgcattcaagactgtgctggaagaggctgagtttcaaaggaaagaatttctcaggaaacaaggccctcattttgctgagtacttgcactgggatgtcacggaagaatgtgaagttcgacttgtttgcaaggttgcaaacaccaagaaagaaaccgttttcaaatggctcaaggatgatgctctgtatgaaacggagacactgcctaacctggagaggggaatctgtgagctcctcatcccaaagttgtcaaagaaggaccacggtgaatacaaggcaaccttgaaagatgacagaggccaagatgtgtccatccttgaaatagctggcaaagtgtatgatgatatgattttggcaatgagtagagtctgtgggaaatctgcttcgccactgaaggtactctgcaccccagaaggaatacgacttcagtgtttcatgaagtattttacagacgaaatgaaagtgaactggtgtcacaaagatgctaagatctcatccagtgagcatatgagaatcggggggagtgaagagatggcttggctgcagatatgtgagccgactgagaaggataaaggaaaatacacttttgagattttcgatggcaaagacaaccatcaacgctcccttgacctgtccggacaagcttttgatgaagcatttgcagaattccagcaattcaaagctgctgcttttgcagagaagaatcgtggcaggttgatcggcggcttgcctgacgtggtgaccatcatggaagggaagaccttgaatctgacctgcacggtgtttggaaaccctgaccccgaagtgatttggttcaagaacgaccaggacatccagctcagcgagcacttctcggtgaaggtggagcaggccaagtacgtcagcatgaccatcaaaggcgtgacctccgaggactcgggcaagtacagcatcaacatcaagaataagtatggcggggagaagatcgacgtgacggtgagcgtgtacaaacacggggagaagatcccggacatggccccgccccagcaagccaagcccaagctcatccccgcgtctgcctcagcggcaggccagtgaaggcgttttcctagcctggagatgggaaaatatgcttggcagagacaggaatgctgtgtgcttgttccaaatgagcagctggcatccgagtggtgtcctgtgtgggctgatagttgatcacacattgtgcttttgatttttgcatttggtgatgaatattttatacccgtctaagggagaaagctaatgttttccacaagactgaacaacgtgtatttacacgagggtagacggcagatgcctgacagagagtgggttggcagacaacacactagcattttcacgggtgtgggcacatgggtgtggcacctggacgtgtgcagcatgtggcggtctctgtgtgaagccaccgtgcttctctttggggggccgcgagatctagcatctctgaaatcctggctgtcgaggctttgaagcatgtgttacctggttaagcttgttttctcttgctttaggcaaataaaagtttaaaaatcaaaaaaaaaaaaaaaaa

SEQ ID NO: 133 - DNA, 3128 bp, Homo sapiens
  ref <308>: DATABASE ACCESSION NUMBER: NM_003981
gcttcgccccgtggcgcggtttgaaattttgcggggctcaacggctcgcggagcggctacgcggagtgacatcgccggtgtttgcgggtggttgttgctctcggggccgtgtggagtaggtctggacctggactcacggctgcttggagcgtccgccatgaggagaagtgaggtgctggcggaggagtccatagtatgtctgcagaaagccctaaatcaccttcgggaaatatgggagctaattgggattccagaggaccagcggttacaaagaactgaggtggtaaagaagcatatcaaggaactcctggatatgatgattgctgaagaggaaagcctgaaggaaagactcatcaaaagcatatccgtctgtcagaaagagctgaacactctgtgcagcgagttacatgttgagccatttcaggaagaaggagagacgaccatcttgcaactagaaaaagatttgcgcacccaagtggaattgatgcgaaaacagaaaaaggagagaaaacaggaactgaagctacttcaagagcaagatcaagaactgtgcgaaattctttgtatgccccactatgatattgacagtgcctcagtgcccagcttagaagagctgaaccagttcaggcaacatgtgacaactttgagggaaacaaaggcttctaggcgtgaggagtttgtcagtataaagagacagatcatactgtgtatggaagaattagaccacaccccagacacaagctttgaaagagatgtggtgtgtgaagacgaagatgccttttgtttgtctttggagaatattgcaacactacaaaagttgctacggcagctggaaatgcagaaatcacaaaatgaagcagtgtgtgaggggctgcgtactcaaatccgagagctctgggacaggttgcaaatacctgaagaagaaagagaagctgtggccaccattatgtctgggtcaaaggccaaggtccggaaagcgctgcaattagaagtggatcggttggaagaactgaaaatgcaaaacatgaagaaagtgattgaggcaattcgagtggagctggttcagtactgggaccagtgcttttatagccaggagcagagacaagcttttgcccctttctgtgctgaggactacacagaaagtctgctccagctccacgatgctgagattgtgcggttaaaaaactactatgaagttcacaaggaactctttgaaggtgtccagaagtgggaagaaacctggaggcttttcttagagtttgagagaaaagcttcagatccaaatcgatttacaaaccgaggaggaaatcttctaaaagaagaaaaacaacgagccaagctccagaaaatgctgcccaagctggaagaagagttgaaggcacgaattgaattgtgggaacaggaacattcaaaggcatttatggtgaatgggcagaaattcatggagtatgtggcagaacaatgggagatgcatcgattggagaaagagagagccaagcaggaaagacaactgaagaacaaaaaacagacagagacagagatgctgtatggcagcgctcctcgaacacctagcaagcggcgaggactggctcccaatacaccgggcaaagcacgtaagctgaacactaccaccatgtccaatgctacggccaatagtagcattcggcctatctttggagggacagtctaccactcccccgtgtctcgacttcctccttctggcagcaagccagtcgctgcttccacctgttcagggaagaaaacaccccgtactggcaggcatggagccaacaaggagaacctggagctcaacggcagcatcctgagtggtgggtaccctggctcggcccccctccagcgcaacttcagcattaattctgttgccagcacctattctgagtttgcgaaggatccgtccctctctgacagttccactgttgggcttcagcgagaactttcaaaggcttccaaatctgatgctacttctggaatcctcaattcaaccaacatccagtcctgagaagccctgatcagtcaaccagctgtggcttcctgtgcctagactggacctaattatatgggggtgactttagtttttcttcagcttaggcgtgcttgaaaccttggccaggttccatgaccatgggcctaacttaaagatgtgaatgagtgttacagttgaaagcccatcataggtttagtggtcctaggagacttggttttgacttatatacatgaaaagtttatggcaagaagtgcaaattttagcatatggggcctgacttctctaccacataattctacttgctgaagcatgatcaaagcttgttttatttcaccactgtaggaaaatgattgactatgcccatccctgggggtaattttggcatgtatacctgtaactagtaattaacatcttttttgtttaggcatgttcaattaatgctgtagctatcatagctttgctcttacctgaagccttgtccccaccacacaggacagccttcctcctgaagagaatgtctttgtgtgtccgaagttgagatggcctgccctactgccaaagaggtgacaggaaggctgggagcagctttgttaaattgtgttcagttctgttacacagtgcattgccctttgttgggggtatgcatgtatgaacacacatgcttgtcggaacgctttctcggcgtttgtcccttggctctcatctcccccattcctgtgcctactttgcctgagttcttctacccccgcagttgccagccacattgggagtctgtttgttccaatgggttgagctgtctttgtcgtggagatctggaactttgcacatgtcactactggggaggtgttcctgctctagcttccacgatgaggcgccctctttacctatcctctcaatcactactcttcttgaagcactattatttattcttccgctgtctgcctgcagcagtactactgtcaacatagtgtaaatggttctcaaaagcttaccagtgtggacttggtgttagccacgctgtttactcatacagtacgtgtcctgtttttaaaatatacaattattcttaaaaataaattaaaatctgtatacttacatttcaaaaagaaaaaaaaaaaaaaaa

SEQ ID NO: 134 - DNA, 3180 bp, Homo sapiens
  ref <308>: DATABASE ACCESSION NUMBER: NM_004153
cggggccacgccgattggcgcgaagttttcttttctccttccaccttcttttcatttctagtgagacacacgctttggtcctggctttcggcccgtagttgtagaaggagccctgctggtgcaggttagaggtgccgcatcccccggagctctcgaagtggaggcggtaggaaacggagggcttgcggctagccggaggaagctttggagccggaagccatggcacactaccccacaaggctgaagaccagaaaaacttattcatgggttggcaggcccttgttggatcgaaaactgcactaccaaacctatagagaaatgtgtgtgaaaacagaaggttgttccaccgagattcacatccagattggacagtttgtgttgattgaaggggatgatgatgaaaacccgtatgttgctaaattgcttgagttgttcgaagatgactctgatcctcctcctaagaaacgtgctcgagtacagtggtttgtccgattctgtgaagtccctgcctgtaaacggcatttgttgggccggaagcctggtgcacaggaaatattctggtatgattacccggcctgtgacagcaacattaatgcggagaccatcattggccttgttcgggtgatacctttagccccaaaggatgtggtaccgacgaatctgaaaaatgagaagacactctttgtgaaactatcctggaatgagaagaaattcaggccactttcctcagaactatttgcggagttgaataaaccacaagagagtgcagccaagtgccagaaacccgtgagagccaagagtaagagtgcagagagcccttcttggaccccagcagaacatgtggccaaaaggattgaatcaaggcactccgcctccaaatctcgccaaactcctacccatcctcttaccccaagagccagaaagaggctggagcttggcaacttaggtaaccctcagatgtcccagcagacttcatgtgcctccttggattctccaggaagaataaaacggaaagtggccttctcggagatcacctcaccttctaagagatctcagcctgataaacttcaaaccttgtctccagctctgaaagccccagagaaaaccagagagactggactctcttatactgaggatgacaagaaggcttcacctgaacatcgcataatcctgagaacccgaattgcagcttcgaaaaccatagacattagagaggagagaacacttacccctatcagtgggggacagagatcttcagtggtgccatccgtgattctgaaaccagaaaacatcaaaaagagggatgcaaaagaagcaaaagcccagaatgaagcgacctctactccccatcgtatccgcagaaagagttctgtcttgactatgaatcggattaggcagcagcttcggtttctaggtaatagtaaaagtgaccaagaagagaaagagattctgccagcagcagagatttcagactctagcagtgacgaagaagaggcttccacaccgccccttccaaggagagcacccagaactgtgtccaggaacctgcgatcttccttgaagtcatccttacataccctcacgaaggtgccaaagaagagtctcaagcctagaacgccacgttgtgccgctcctcagatccgtagtcgaagcctggctgcccaggagccagccagtgtgctggaggaagcccgactgaggctgcatgtttctgctgtacctgagtctcttccctgtcgggaacaggaattccaagacatctacaattttgtggaaagcaaactccttgaccataccggagggtgcatgtacatctccggtgtccctgggacagggaagactgccactgttcatgaagtgatacgctgcctgcagcaggcagcccaagccaatgatgttcctccctttcaatacattgaggtcaatggcatgaagctgacggagccccaccaagtctatgtgcaaatcttgcagaagctaacaggccaaaaagcaacagccaaccatgcggcagaactgctggcaaagcaattctgcacccgagggtcacctcaggaaaccaccgtcctgcttgtggatgagctcgaccttctgtggactcacaaacaagacataatgtacaatctctttgactggcccactcataaggaggcccggcttgtggtcctggcaattgccaacacaatggacctgccagagcgaatcatgatgaaccgggtgtccagccgactgggtcttaccaggatgtgcttccagccctatacatatagccagctgcagcagatcctaaggtcccggctcaagcatctaaaggcctttgaagatgatgccatccagctggtagccaggaaggtagcagcactgtctggagatgcacgacggtgcctggacatctgcaggcgtgccacagagatctgtgagttctcccagcagaagcctgactcccctggcctggtcaccatagcccactcaatggaagctgtggatgagatgttttcatcatcatacatcacggccatcaaaaattcctctgttctggaacagagcttcctgagagccatcctcgcagagttccgtcgatcaggactggaggaagccacgtttcaacagatatatagtcaacatgtggcactgtgcagaatggagggactgccgtaccccaccatgtcagagaccatggccgtgtgttctcacctgggctcctgtcgcctcctgcttgtggagcccagcaggaacgatctgctccttcgggtgcggctcaacgtcagccaggatgatgtgctgtatgcgctgaaagacgagtaaaggggcttcacaagttaaaagactggggtcttgctgggttttgttttttgagacagggtcttgctctgtcgcccaggctggagtgcagtggcacgatcatggctcactgcagccttgacttctcaggcttaggtgaccccccaacctcatcctcccaggtggctgaaactacaggcacatgccaccatgcccagctgattttttgtagagacagggcttcaccatgttgccaagctagtctacaaagcatctgattttggaagtacatggaattgttgtaacaaagtatattgaatggaaatggctctcatgtattttggaattttccattaaataatttgctttttcctgaaaaaaaaaaaaaaaaaaaaaaaa

SEQ ID NO: 135 - DNA, 2352 bp, Homo sapiens
  ref <308>: DATABASE ACCESSION NUMBER: NM_004162
gccattaccaatcgcgaaaccgcgccggcggcggcggcggcggcggcggaggaggagaaaggaaagaggaagggggagcggcgagaggcggagacggagcccgacaggggcggcaccacggcacgagccccgcacagtccagtgtgaggggagcggcgctaagagcaggcgacgccgccgccgccaccaccaccgccatagatacactctcatcctacgggccacgcctgggccttgctgccaggaagcttcggccccgcagctcggcttgctgcggtctcaggtttctttacctccagaaagaagaatattggccccttgaattctggaagttcattgaagagtctgaaattagggacttatttcaaatttggacatggctagtcgaggcgcaacaagacccaacgggccaaatactggaaataaaatatgccagttcaaactagtacttctgggagagtccgctgttggcaaatcaagcctagtgcttcgttttgtgaaaggccaatttcatgaatttcaagagagtaccattggggctgcttttctaacccaaactgtatgtcttgatgacactacagtaaagtttgaaatatgggatacagctggtcaagaacgataccatagcctagcaccaatgtactacagaggagcacaagcagccatagttgtatatgatatcacaaatgaggagtcctttgcaagagcaaaaaattgggttaaagaacttcagaggcaagcaagtcctaacattgtaatagctttatcgggaaacaaggccgacctagcaaataaaagagcagtagatttccaggaagcacagtcctatgcagatgacaatagtttattattcatggagacatccgctaaaacatcaatgaatgtaaatgaaatattcatggcaatagctaaaaaattgccaaagaatgaaccacaaaatccaggagcaaattctgccagaggaagaggagtagaccttaccgaacccacacaaccaaccaggaatcagtgttgtagtaactaaacctctagtttgaactagctggaatagtcttctgcttcctaaatgttaataacaatggaattggagcatttaaccagcccagtatgacttccaaaagaagagacttatgatagagtcaagtttctaatacagaattattttaagtgttttgaacttaatttttaataacatgcatgggtccctctcactaatgtttcaacaatagggaaaaatgagaactatgtggacacttgtttcattggaaggttagggggaataatttctcatcactaggaatatagacaaatgactgtctgggcccacacagttaaccagcccatttctccacactggtacagtagtcacctgtgaaaaaaaaaaattggaacttactaatttgggcttttcaaaaacattctttgtttagaaggagattctaaagttatttatgatgcttagccatagtattcaggcaaatgttcatttctcctggtacctgtatttaaaatgtacattccacattttaataaattaaccacaagaaaataatcccacatatacaaggtcaggggtggggaagagtattaatggtatcttaattatacccagtctggttttttttttaaatggggtaaaaatcaaatgcaaccccatcttgttttaggaattttgagaactaataaatgcaccttaatggtcagtgttcctttcaaacatgtgagttctttaacaaaaatgaaataaaccaggtgtctgtgatttctaattaatcaccgctggccattacacaggttttgttgtttggggtggggagggggcttttgttcccttttgacataatatagtcaatgcactaacaattatgtatattcaaacttgattattttaaattcgatcttcagctgtactgtaaatagggtactgcattgtagtctccatatctgtattacttttctgtaatatttaagagttgcttaaaagcatacaaaatgtactgttactaaaacagctaattatttctctctccccctttgacaggaaggggcttcagttgttcctccatggctagaaccataataaacaatgtacccgtaatttgtaacataaagtattgcaatatgttagtaacaatcttgcagccttcctttccaaagttcattttattttgatcagttcagtatattgcactaattattttaggtattttcattatatgaaagctaccatgtgtcagagatgatttaatctatttaagtgttggactgctaggagaacttgtacatttatgataatgcagaattaggaaaacggttcaccagtgtttagttttatattgaggtgctcaggtt

SEQ ID NO: 136 - DNA, 2121 bp, Homo sapiens
  ref <308>: DATABASE ACCESSION NUMBER: NM_004203
tggaatttttggcgcgagcagctccgcgcgcgttcacgggccgttccccctcacgggagtcctccgcccgggcgtccggaacagtcgacggcagactccggcccgctgagccacccgaggggtcccgtggcctccgcggacccggaatctgggccctcgcggacccgcgccccgcccagtcgccccagggcttccccacacccacggagtgaagtcagccgcggccctgcctgggaggaacttaccgtctaccgggaaaggtggccagcagatgtgtcgggcctggtgagagggtgaggcgagacggcccgatcgcccagggccccggaagctgcggaggtcacccccgcctggccttagctcagggacaccctggattcacgtgggagcccctgctcctgcctcccccgtcccaccactgaggctgttgggccaggccagtcatgctagaacggcctcctgcactggccatgcccatgcccacggagggcaccccgccacctctgagtggcacccccatcccagtcccagcctacttccgccacgcagaacctggattctccctcaagaggcccagggggctcagccggagcctcccacctccgccccctgccaagggcagcattcccatcagccgcctcttccctcctcggaccccaggctggcaccagctgcagccccggcgggtgtcattccggggcgaggcctcagagactctgcagagccctgggtatgacccaagccggccagagtccttcttccagcagagcttccagaggctcagccgcctgggccatggctcctacggagaggtcttcaaggtgcgctccaaggaggacggccggctctatgcggtaaagcgttccatgtcaccattccggggccccaaggaccgggcccgcaagttggccgaggtgggcagccacgagaaggtggggcagcacccatgctgcgtgcggctggagcaggcctgggaggagggcggcatcctgtacctgcagacggagctgtgcgggcccagcctgcagcaacactgtgaggcctggggtgccagcctgcctgaggcccaggtctggggctacctgcgggacacgctgcttgccctggcccatctgcacagccagggcctggtgcaccttgatgtcaagcctgccaacatcttcctggggccccggggccgctgcaagctgggtgacttcggactgctggtggagctgggtacagcaggagctggtgaggtccaggagggagacccccgctacatggcccccgagctgctgcagggctcctatgggacagcagcggatgtgttcagtctgggcctcaccatcctggaagtggcatgcaacatggagctgccccacggtggggagggctggcagcagctgcgccagggctacctgccccctgagttcactgccggtctgtcttccgagctgcgttctgtccttgtcatgatgctggagccagaccccaagctgcgggccacggccgaggccctgctggcactgcctgtgttgaggcagccgcgggcctggggtgtgctgtggtgcatggcagcggaggccctgagccgagggtgggccctgtggcaggccctgcttgccctgctctgctggctctggcatgggctggctcaccctgccagctggctacagcccctgggcccgccagccaccccgcctggctcaccaccctgcagtttgctcctggacagcagcctctccagcaactgggatgacgacagcctagggccttcactctcccctgaggctgtcctggcccggactgtggggagcacctccaccccccggagcaggtgcacacccagggatgccctggacctaagtgacatcaactcagagcctcctcggggctccttcccctcctttgagcctcggaacctcctcagcctgtttgaggacaccctagacccaacctgagccccagactctgcctctgcacttttaaccttttatcctgtgtctctcccgtcgcccttgaaagctggggcccctcgggaactcccatggtcttctctgcctggccgtgtctaataaaaagtatttgaaccttgggagcacccaagcttgctcatgtggcaaaaaaaaaaaaaaaaaa

SEQ ID NO: 137 - DNA, 1845 bp, Homo sapiens
  ref <308>: DATABASE ACCESSION NUMBER: NM_004216
gcggatggatccaacatggcggcgccgagcctgagccgagagaagagacctgggaaattaagtttcttgcggagtacggtggggattgcagctgctgagcagggattctggaaagcattgcgtacctgagcccccagcatggcgggcctaaagcggcgggcaagccaggtgtggccagaagagcatggtgagcaggaacatgggctgtacagcctgcaccgcatgtttgacatcgtgggcactcatctgacacacagagatgtgcgcgtgctttctttcctctttgttgatgtcattgatgaccacgagcgtggactcatccgaaatggacgtgacttcttattggcactggagcgccagggccgctgtgatgaaagtaactttcgccaggtgctgcagctgctgcgcatcatcactcgccacgacctgctgccctacgtcaccctcaagaggagacgggctgtgtgccctgatcttgtagacaagtatctggaggagacatcaattcgctatgtgacccccagagccctcagtgatccagaaccaaggcctccccagccctctaaaacagtgcctccccactatcctgtggtgtgttgccccacttcgggtcctcagatgtgtagcaagcggccagcccgagggagagccacacttgggagccagcgaaaacgccggaagtcagtgacaccagatcccaaggagaagcagacatgtgacatcagactgcgggttcgggctgaatactgccagcatgagactgctctgcagggcaatgtcttctctaacaagcaggacccacttgagcgccagtttgagcgctttaaccaggccaacaccatcctcaagtcccgggacctgggctccatcatctgtgacatcaagttctctgagctcacctacctcgatgcattctggcgtgactacatcaatggctctttattagaggcacttaaaggtgtcttcatcacagactccctcaagcaagctgtgggccatgaagccatcaagctgctggtaaatgtagacgaggaggactatgagctgggccgacagaaactcctgaggaacttgatgctgcaagcattgccctgacctattccctcttctcactttggggactgttcccatcacccacctctggagcttacactgttctggggtttgttctctacccttccaaccaatcacacccctccctgcacccatgtgcctgggcttcccctttatttcccttttccatttaccccgtaatgtgtctctacagctaccttaccactgagccgtaagacaaatgtataggaagaagcaaagtctacagcacatagtctttgtaagggattgatgtgaacactttttttggatgcactgaggagttatcaatacttctggctttatgagagctcttaaattttgtctaaaaaaccaaagggctgtgagtaagggagctatgtggaaagtgggactctgaagtgtattttgaaaattaatcgccaccctcttccaaattatagaattttttaaaaacaagctgtggccctttccactctctcctggcctctggtgctgctcctctctgccgcctttcctccattccatggcttgaaacctctgcctgatgtggctccttcctttttcccatttgtcaaaccctcttcaaaggaggaacagataagactgggtctgcctagtcatgcctcccaactgtggtggtatatgtgtacacacatacacagggtggatggagaagaggttgctgattaaaatacactccccctataaaggggaagggggagtgtgacactttctttccatgttcaagtgaaaataaataatgtaccctgc

SEQ ID NO: 138 - DNA, 1224 bp, Homo sapiens
  ref <308>: DATABASE ACCESSION NUMBER: NM_004217
ggccgggagagtagcagtgccttggaccccagctctcctccccctttctctctaaggatggcccagaaggagaactcctacccctggccctacggccgacagacggctccatctggcctgagcaccctgccccagcgagtcctccggaaagagcctgtcaccccatctgcacttgtcctcatgagccgctccaatgtccagcccacagctgcccctggccagaaggtgatggagaatagcagtgggacacccgacatcttaacgcggcacttcacaattgatgactttgagattgggcgtcctctgggcaaaggcaagtttggaaacgtgtacttggctcgggagaagaaaagccatttcatcgtggcgctcaaggtcctcttcaagtcccagatagagaaggagggcgtggagcatcagctgcgcagagagatcgaaatccaggcccacctgcaccatcccaacatcctgcgtctctacaactatttttatgaccggaggaggatctacttgattctagagtatgccccccgcggggagctctacaaggagctgcagaagagctgcacatttgacgagcagcgaacagccacgatcatggaggagttggcagatgctctaatgtactgccatgggaagaaggtgattcacagagacataaagccagaaaatctgctcttagggctcaagggagagctgaagattgctgacttcggctggtctgtgcatgcgccctccctgaggaggaagacaatgtgtggcaccctggactacctgcccccagagatgattgaggggcgcatgcacaatgagaaggtggatctgtggtgcattggagtgctttgctatgagctgctggtggggaacccaccctttgagagtgcatcacacaacgagacctatcgccgcatcgtcaaggtggacctaaagttccccgcttctgtgcccacgggagcccaggacctcatctccaaactgctcaggcataacccctcggaacggctgcccctggcccaggtctcagcccacccttgggtccgggccaactctcggagggtgctgcctccctctgcccttcaatctgtcgcctgatggtccctgtcattcactcgggtgcgtgtgtttgtatgtctgtgtatgtataggggaaagaagggatccctaactgttcccttatctgttttctacctcctcctttgtttaataaaggctgaagctttttgt

SEQ ID NO: 139 - DNA, 3446 bp, Homo sapiens
  ref <308>: DATABASE ACCESSION NUMBER: NM_004336
ttctagtttgcggttcaggtttgccgctgccggccagcgtcctctggccatggacaccccggaaaatgtccttcagatgcttgaagcccacatgcagagctacaagggcaatgaccctcttggtgaatgggaaagatacatacagtgggtagaagagaattttcctgagaataaagaatacttgataactttactagaacatttaatgaaggaatttttagataagaagaaataccacaatgacccaagattcatcagttattgtttaaaatttgctgagtacaacagtgacctccatcaattttttgagtttctgtacaaccatgggattggaaccctgtcatcccctctgtacattgcctgggcggggcatctggaagcccaaggagagctgcagcatgccagtgctgtccttcagagaggaattcaaaaccaggctgaacccagagagttcctgcaacaacaatacaggttatttcagacacgcctcactgaaacccatttgccagctcaagctagaacctcagaacctctgcataatgttcaggttttaaatcaaatgataacatcaaaatcaaatccaggaaataacatggcctgcatttctaagaatcagggttcagagctttctggagtgatatcttcagcttgtgataaagagtcaaatatggaacgaagagtgatcacgatttctaaatcagaatattctgtgcactcatctttggcatccaaagttgatgttgagcaggttgttatgtattgcaaggagaagcttattcgtggggaatcagaattttcctttgaagaattgagagcccagaaatacaatcaacggagaaagcatgagcaatgggtaaatgaagacagacattatatgaaaaggaaagaagcaaatgcttttgaagaacagctattaaaacagaaaatggatgaacttcataagaagttgcatcaggtggtggagacatcccatgaggatctgcccgcttcccaggaaaggtccgaggttaatccagcacgtatggggccaagtgtaggctcccagcaggaactgagagcgccatgtcttccagtaacctatcagcagacaccagtgaacatggaaaagaacccaagagaggcacctcctgttgttcctcctttggcaaatgctatttctgcagctttggtgtccccagccaccagccagagcattgctcctcctgttcctttgaaagcccagacagtaacagactccatgtttgcagtggccagcaaagatgctggatgtgtgaataagagtactcatgaattcaagccacagagtggagcagagatcaaagaagggtgtgaaacacataaggttgccaacacaagttcttttcacacaactccaaacacatcactgggaatggttcaggcaacgccatccaaagtgcagccatcacccaccgtgcacacaaaagaagcattaggtttcatcatgaatatgtttcaggctcctacacttcctgatatttctgatgacaaagatgaatggcaatctctagatcaaaatgaagatgcatttgaagcccagtttcaaaaaaatgtaaggtcatctggggcttggggagtcaataagatcatctcttctttgtcatctgcttttcatgtgtttgaagatggaaacaaagaaaattatggattaccacagcctaaaaataaacccacaggagccaggacctttggagaacgctctgtcagcagacttccttcaaaaccaaaggaggaagtgcctcatgctgaagagtttttggatgactcaactgtatggggtattcgctgcaacaaaaccctggcacccagtcctaagagcccaggagacttcacatctgctgcacaacttgcgtctacaccattccacaagcttccagtggagtcagtgcacattttagaagataaagaaaatgtggtagcaaaacagtgtacccaggcgactttggattcttgtgaggaaaacatggtggtgccttcaagggatggaaaattcagtccaattcaagagaaaagcccaaaacaggccttgtcgtctcacatgtattcagcatccttacttcgtctgagccagcctgctgcaggtggggtacttacctgtgaggcagagttgggcgttgaggcttgcagactcacagacactgacgctgccattgcagaagatccaccagatgctattgctgggctccaagcagaatggatgcagatgagttcacttgggactgttgatgctccaaacttcattgttgggaacccatgggatgataagctgattttcaaacttttatctgggctttctaaaccagtgagttcctatccaaatacttttgaatggcaatgtaaacttccagccatcaagcccaagactgaatttcaattgggttctaagctggtctatgtccatcaccttcttggagaaggagcctttgcccaggtgtacgaagctacccagggagatctgaatgatgctaaaaataaacagaaatttgttttaaaggtccaaaagcctgccaacccctgggaattctacattgggacccagttgatggaaagactaaagccatctatgcagcacatgtttatgaagttctattctgcccacttattccagaatggcagtgtattagtaggagagctctacagctatggaacattattaaatgccattaacctctataaaaatacccctgaaaaagtgatgcctcaaggtcttgtcatctcttttgctatgagaatgctttacatgattgagcaagtgcatgactgtgaaatcattcatggagacattaaaccagacaatttcatacttggaaacggatttttggaacaggatgatgaagatgatttatctgctggcttggcactgattgacctgggtcagagtatagatatgaaactttttccaaaaggaactatattcacagcaaagtgtgaaacatctggttttcagtgtgttgagatgctcagcaacaaaccatggaactaccagatcgattactttggggttgctgcaacagtatattgcatgctctttggcacttacatgaaagtgaaaaatgaaggaggagagtgtaagcctgaaggtctttttagaaggcttcctcatttggatatgtggaatgaattttttcatgttatgttgaatattccagattgtcatcatcttccatctttggatttgttaaggcaaaagctgaagaaagtatttcaacaacactatactaacaagattagggccctacgtaataggctaattgtactgctcttagaatgtaagcgttcacgaaaataaaatttggatatagacagtccttaaaaatcacactgtaaatatgaatctgctcactttaaacctgtttttttttcatttattgtttatgtaaatgtttgttaaaaataaatcccatggaatatttccatgtaaaaaaaaa

SEQ ID NO: 140 - DNA, 3463 bp, Homo sapiens
  ref <308>: DATABASE ACCESSION NUMBER: NM_004349
tgaataaattattcggcatttagcttatcattctgaatttcactttttgctttttggtgctctgaaacttgcagagagaggtggagtgctaaggggagggtaggggttgtgatactttgcacacacatccctgtcattgttctgcctaaagagacagggctgggttcaaggccacatgtgctcctgtcatcctccacatttctgctccaagtgcaatccggagtgtcagctctccatctgtctctgcctggcaggcgcacgcgcccagcaccctgcctccggcgatgccgccccagcccctctgatggccctcctctctgctgccactcattccagaacaggaggcatgagcccggaacgcgcttgcttttaggagacagccactttctgtgtggtacgctggattcaaggatgcctgatcgtactgagaagcactccacaatgccagactcacctgtggatgtgaagacgcaatctaggctgactcctccaacaatgccacctcccccaactactcaaggagctccaagaaccagttcatttacaccgacaacgttaactaatggcacgagccattctcctacagccttgaatggcgccccctcaccacccaatggcttcagcaatgggccttcctcttcttcctcctcctctctggctaatcaacagctgcccccagcctgtggtgccaggcaactcagcaagctgaaaaggttccttactaccctgcagcagtttggcaatgacatttcacccgagataggagaaagagttcgcaccctcgttctgggactagtgaactccactttgacaattgaagaatttcattccaaactgcaagaagctactaacttcccactgagaccttttgtcatcccatttttgaaggccaacttgcccctgctgcagcgtgagctcctccactgcgcaagactggccaaacagaaccctgcccagtacctcgcccagcatgaacagctgcttctggatgccagcaccacctcacctgttgactcctcagagctgcttctcgatgtgaacgaaaacgggaagaggcgaactccagacagaaccaaagaaaatggctttgacagagagcctttgcactcagaacatccaagcaagcgaccatgcactattagcccaggccagcggtacagtccaaataacggcttatcctaccagcccaatggcctgcctcaccctaccccacctccacctcagcattaccgtttggatgatatggccattgcccaccactacagggactcctatcgacaccccagccacagggacctcagggacagaaacagacctatggggttgcatggcacacgtcaagaagaaatgattgatcacagactaacagacagagaatgggcagaagagtggaaacatcttgaccatctgttaaactgcataatggacatggtagaaaaaacaaggcgatctctcaccgtactaaggcggtgtcaagaagcagaccgggaagaattgaattactggatccggcggtacagtgacgccgaggacttaaaaaaaggtggcggcagtagcagcagccactctaggcagcagagtcccgtcaacccagacccagttgcactagacgcgcatcgggaattccttcacaggcctgcgtctggatacgtgccagaggagatctggaagaaagctgaggaggccgtcaatgaggtgaagcgccaggcgatgacggagctgcagaaggccgtgtctgaggcggagcggaaagcccacgacatgatcacaacagagagggccaagatggagcgcacggtcgccgaggccaaacggcaggcggcggaggacgcactggcagttatcaatcagcaggaggattcaagcgagagttgctggaattgtggccgtaaagcgagtgaaacctgcagtggctgtaacacagcccgatactgtggctcattttgccagcacaaagactgggagaagcaccatcacatctgtggacagaccctgcaggcccagcagcagggagacacacctgcagtcagctcctctgtcacgcccaacagcggggctgggagcccgatggacacaccaccagcagccactccgaggtcaaccaccccgggaaccccttccaccatagagacaacccctcgctagacgtgaactcagaactgtcggaggaaagacaacacaaccaacgcgaaaccaattcctcatcctcagatgctcaaagttgttttttttgtttgtttgtttattagatgaattatcctatttcagtacttcagcaagagagaacctaactgtatcttgaggtggtagtaaaacacagagggccagtaacgggtcgtaatgacttattgtggataacaaagatatcttttctttagagaactgaaaagagagcagagaatataacatgaaatgatagatttgacctcctccctgttattttcaagtagctgggattttaaactagatgacctcattaaccgatgctttaccaaacagcaaaccaagagattgctaattgctgttgaaagcaaaaatgctaatattaaaagtcacaatgttctttatatacaataatggaaaaaaaaaaaagaggaaaaccctcaagggcatgagcattggatacagcagtagacattttaacaagaagatgaatggcgtccgtgggttgctaactgaactttgaagacccgctacaaaacgcgcagatgtgcagcagattggaaggagacacagatgttcggtttttttcctgtttctgaaaagaaataataatatccaggtcaacagaatgaaaaatgaaagatgatttgcaatgggatgtatgaatacagcagcaagaaaaaaaaatgccataatacaaaaggctccatatatatatatatatatatatatatacacacacacacacgcacatatacacacacacacacacacacacacacacacacacacacacacacacacacacacaagtaagagactcagcctgcagttaattagcattctggcagttttgacatcagccagctgccctaaataacccttcaacgtttcttcacttttgcaaggttccacagagtaagacattgggtctattccagctcattcattttatattgaaaaaaataattttaaaaatggtggcttcagctccagcccctttccaaaatttttcaaccccaccctgtttggatttttaattaaaaactagtagttctcttggtgttaaaacacttctgtcctgtgaggtttcccaatggtgtttttcttgtaaatgtgttggacaaatgtgaagatgcattgtagtttaaccatatgcccacatttagtctctttattcctagttggtgagaaacctgtatctttctatgctgcttttatatctgtatgtattagtgatatttctctagtagttaaaaaaaaaaaaaggaaaaaaagactctttttggttgtcctcaag

SEQ ID NO: 141 - DNA, 2695 bp, Homo sapiens
  ref <308>: DATABASE ACCESSION NUMBER: NM_004456
caaataaaagcgatggcgattgggctgccgcgtttggcgctcggtccggtcgcgtccgacacccggtgggactcagaaggcagtggagccccggcggcggcggcggcggcgcgcgggggcgacgcgcgggaacaacgcgagtcggcgcgcgggacgaagaataatcatgggccagactgggaagaaatctgagaagggaccagtttgttggcggaagcgtgtaaaatcagagtacatgcgactgagacagctcaagaggttcagacgagctgatgaagtaaagagtatgtttagttccaatcgtcagaaaattttggaaagaacggaaatcttaaaccaagaatggaaacagcgaaggatacagcctgtgcacatcctgacttctgtgagctcattgcgcgggactagggagtgttcggtgaccagtgacttggattttccaacacaagtcatcccattaaagactctgaatgcagttgcttcagtacccataatgtattcttggtctcccctacagcagaattttatggtggaagatgaaactgttttacataacattccttatatgggagatgaagttttagatcaggatggtactttcattgaagaactaataaaaaattatgatgggaaagtacacggggatagagaatgtgggtttataaatgatgaaatttttgtggagttggtgaatgcccttggtcaatataatgatgatgacgatgatgatgatggagacgatcctgaagaaagagaagaaaagcagaaagatctggaggatcaccgagatgataaagaaagccgcccacctcggaaatttccttctgataaaatttttgaagccatttcctcaatgtttccagataagggcacagcagaagaactaaaggaaaaatataaagaactcaccgaacagcagctcccaggcgcacttcctcctgaatgtacccccaacatagatggaccaaatgctaaatctgttcagagagagcaaagcttacactcctttcatacgcttttctgtaggcgatgttttaaatatgactgcttcctacatcgtaagtgcaattattcttttcatgcaacacccaacacttataagcggaagaacacagaaacagctctagacaacaaaccttgtggaccacagtgttaccagcatttggagggagcaaaggagtttgctgctgctctcaccgctgagcggataaagaccccaccaaaacgtccaggaggccgcagaagaggacggcttcccaataacagtagcaggcccagcacccccaccattaatgtgctggaatcaaaggatacagacagtgatagggaagcagggactgaaacggggggagagaacaatgataaagaagaagaagagaagaaagatgaaacttcgagctcctctgaagcaaattctcggtgtcaaacaccaataaagatgaagccaaatattgaacctcctgagaatgtggagtggagtggtgctgaagcctcaatgtttagagtcctcattggcacttactatgacaatttctgtgccattgctaggttaattgggaccaaaacatgtagacaggtgtatgagtttagagtcaaagaatctagcatcatagctccagctcccgctgaggatgtggatactcctccaaggaaaaagaagaggaaacaccggttgtgggctgcacactgcagaaagatacagctgaaaaaggacggctcctctaaccatgtttacaactatcaaccctgtgatcatccacggcagccttgtgacagttcgtgcccttgtgtgatagcacaaaatttttgtgaaaagttttgtcaatgtagttcagagtgtcaaaaccgctttccgggatgccgctgcaaagcacagtgcaacaccaagcagtgcccgtgctacctggctgtccgagagtgtgaccctgacctctgtcttacttgtggagccgctgaccattgggacagtaaaaatgtgtcctgcaagaactgcagtattcagcggggctccaaaaagcatctattgctggcaccatctgacgtggcaggctgggggatttttatcaaagatcctgtgcagaaaaatgaattcatctcagaatactgtggagagattatttctcaagatgaagctgacagaagagggaaagtgtatgataaatacatgtgcagctttctgttcaacttgaacaatgattttgtggtggatgcaacccgcaagggtaacaaaattcgttttgcaaatcattcggtaaatccaaactgctatgcaaaagttatgatggttaacggtgatcacaggataggtatttttgccaagagagccatccagactggcgaagagctgttttttgattacagatacagccaggctgatgccctgaagtatgtcggcatcgaaagagaaatggaaatcccttgacatctgctacctcctcccccctcctctgaaacagctgccttagcttcaggaacctcgagtactgtgggcaatttagaaaaagaacatgcagtttgaaattctgaatttgcaaagtactgtaagaataatttatagtaatgagtttaaaaatcaactttttattgccttctcaccagctgcaaagtgttttgtaccagtgaatttttgcaataatgcagtatggtacatttttcaactttgaataaagaatacttgaacttgtcaaaaaaaaaa

SEQ ID NO: 142 - DNA, 3453 bp, Homo sapiens
  ref <308>: DATABASE ACCESSION NUMBER: NM_004526
acttttcgcgcgaaacctggttgttgctgtagtggcggagaggatcgtggtactgctatggcggaatcatcggaatccttcaccatggcatccagcccggcccagcgtcggcgaggcaatgatcctctcacctccagccctggccgaagctcccggcgtactgatgccctcacctccagccctggccgtgaccttccaccatttgaggatgagtccgaggggctcctaggcacagaggggcccctggaggaagaagaggatggagaggagctcattggagatggcatggaaagggactaccgcgccatcccagagctggacgcctatgaggccgagggactggctctggatgatgaggacgtagaggagctgacggccagtcagagggaggcagcagagcgggccatgcggcagcgtgaccgggaggctggccggggcctgggccgcatgcgccgtgggctcctgtatgacagcgatgaggaggacgaggagcgccctgcccgcaagcgccgccaggtggagcgggccacggaggacggcgaggaggacgaggagatgatcgagagcatcgagaacctggaggatctcaaaggccactctgtgcgcgagtgggtgagcatggcgggcccccggctggagatccaccaccgcttcaagaacttcctgcgcactcacgtcgacagccacggccacaacgtcttcaaggagcgcatcagcgacatgtgcaaagagaaccgtgagagcctggtggtgaactatgaggacttggcagccagggagcacgtgctggcctacttcctgcctgaggcaccggcggagctgctgcagatctttgatgaggctgccctggaggtggtactggccatgtaccccaagtacgaccgcatcaccaaccacatccatgtccgcatctcccacctgcctctggtggaggagctgcgctcgctgaggcagctgcatctgaaccagctgatccgcaccagtggggtggtgaccagctgcactggcgtcctgccccagctcagcatggtcaagtacaactgcaacaagtgcaatttcgtcctgggtcctttctgccagtcccagaaccaggaggtgaaaccaggctcctgtcctgagtgccagtcggccggcccctttgaggtcaacatggaggagaccatctatcagaactaccagcgtatccgaatccaggagagtccaggcaaagtggcggctggccggctgccccgctccaaggacgccattctcctcgcagatctggtggacagctgcaagccaggagacgagatagagctgactggcatctatcacaacaactatgatggctccctcaacactgccaatggcttccctgtctttgccactgtcatcctagccaaccacgtggccaagaaggacaacaaggttgctgtaggggaactgaccgatgaagatgtgaagatgatcactagcctctccaaggatcagcagatcggagagaagatctttgccagcattgctccttccatctatggtcatgaagacatcaagagaggcctggctctggccctgttcggaggggagcccaaaaacccaggtggcaagcacaaggtacgtggtgatatcaacgtgctcttgtgcggagaccctggcacagcgaagtcgcagtttctcaagtatattgagaaagtgtccagccgagccatcttcaccactggccagggggcgtcggctgtgggcctcacggcgtatgtccagcggcaccctgtcagcagggagtggaccttggaggctggggccctggttctggctgaccgaggagtgtgtctcattgatgaatttgacaagatgaatgaccaggacagaaccagcatccatgaggccatggagcaacagagcatctccatctcgaaggctggcatcgtcacctccctgcaggctcgctgcacggtcattgctgccgccaaccccataggagggcgctacgacccctcgctgactttctctgagaacgtggacctcacagagcccatcatctcacgctttgacatcctgtgtgtggtgagggacaccgtggacccagtccaggacgagatgctggcccgcttcgtggtgggcagccacgtcagacaccaccccagcaacaaggaggaggaggggctggccaatggcagcgctgctgagcccgccatgcccaacacgtatggcgtggagcccctgccccaggaggtcctgaagaagtacatcatctacgccaaggagagggtccacccgaagctcaaccagatggaccaggacaaggtggccaagatgtacagtgacctgaggaaagaatctatggcgacaggcagcatccccattacggtgcggcacatcgagtccatgatccgcatggcggaggcccacgcgcgcatccatctgcgggactatgtgatcgaagacgacgtcaacatggccatccgcgtgatgctggagagcttcatagacacacagaagttcagcgtcatgcgcagcatgcgcaagacttttgcccgctacctttcattccggcgtgacaacaatgagctgttgctcttcatactgaagcagttagtggcagagcaggtgacatatcagcgcaaccgctttggggcccagcaggacactattgaggtccctgagaaggacttggtggataaggctcgtcagatcaacatccacaacctctctgcattttatgacagtgagctcttcaggatgaacaagttcagccacgacctgaaaaggaaaatgatcctgcagcagttctgaggccctatgccatccataaggattccttgggattctggtttggggtggtcagtgccctctgtgctttatggacacaaaaccagagcacttgatgaactcggggtactagggtcagggcttatagcaggatgtctggctgcacctggcatgactgtttgtttctccaagcctgctttgtgcttctcacctttgggtgggatgccttgccagtgtgtcttacttggttgctgaacatcttgccacctccgagtgctttgtctccactcagtaccttggatcagagctgctgagttcaggatgcctgcgtgtggtttaggtgttagccttcttacatggatgtcaggagagctgctgccctcttggcgtgagttgcgtattcaggctgcttttgctgcctttggccagagagctggttgaagatgtttgtaatcgttttcagtctcctgcaggtttctgtgcccctgtggtggaagagggcacgacagtgccagcgcagcgttctgggctcctcagtcgcaggggtgggatgtgagtcatgcggattatccactcgccacagttatcagctgccattgctccctgtctgtttccccactctcttatttgtgcattcggtttggtttctgtagttttaatttttaataaagttgaataaaatataaaaaaaaaaaaaaaaaaaaa

SEQ ID NO: 143 - DNA, 2328 bp, Homo sapiens
  ref <308>: DATABASE ACCESSION NUMBER: NM_004527
aaaggaccgaggcgtgcagcggacagcagatggatcccgcggccagcagctgcatgaggagcctccagcccccagcccctgtctggggctgccttcgaaacccccactcggaaggcaatggggcctcagggctaccccactacccgcccaccccgttctccttccaccagaaaccagacttcctggcgacagcgacggcagcgtaccctgacttctcagcctcctgcctggcagccaccccacacagcctgccccaggaggagcacatcttcactgagcagcaccccgctttcccacagtcccccaactggcacttccctgtctcagacgcccggcgcaggcccaactcaggcccggcagggggttccaaggaaatggggaccagcagcctgggcctggtggacaccacaggaggcccaggcgatgactacggggtgcttgggagcactgccaatgagacagagaagaaatcatccaggcggagaaaggagagttcagacaaccaggagaacagagggaagccggagggcagcagcaaagcccgcaaggagaggacggccttcaccaaggagcagctgcgagagctggaggcagagtttgcccatcataactacctgactcggctccgcagatatgagattgcggtaaacctggacctctctgagcgccaggtcaaagtgtggttccagaaccgaaggatgaagtggaagcgtgtgaagggaggtcagcccatctcccccaatgggcaggaccctgaggatggggactccacagcctctccaagttcagagtgagattctgcatggaggaaaaatgactaaggactgagccccctacccaactacccccaccccaatcccaccttcaccctcttccttccccagccagggcagcctctccacatctttccctgactcttggatatgaaactgcccagcattcctgggagtcttaggattttctaggaagttctgtccagcctcttagcagcctcttccctagggcctttgctcccacactctcatggaatcagacagagatcctaccgggccggatgaatctggaaacagcttcagagatactgcttctcagcgtctcttggctgccacccatgcctcctcctaccgctgttctcctaggtcagccaggcctcctcctggtctggacaccacctggcctggtgggagaggagctttggaaccagctggcgactcggaaagtaaatgcttcaaaaggaaggaaatgacagagacacacgcccttgcccaccttcctctgtaggctgcacatctgaggctttggggccccttagttgtcccgaaaccccaagaaaaatcagaatgaggagagtcaaggacagcaactcagctgctgcaagccagaaacacatccctgtctccaaatttgttggctaagtggagacacttctgagaactgactagagaagacagaaaaatagcccgatgtaggtttcggtgtccccatataggcccgtccacacaggcttgactgggtggacaagaatgaacccatgacagcacctgctgcttcaaaatcaaaatcaatttagggatacagcaggggctgttgggctgtgctccagagaaaaggagcagctactccttttaaatccacgatttctggattgaaaacctgtccagatgctgagttgttgggctgaacaactaggagctgaaaacaacgtagaggctggaaagtgtcccctgcattctggaggggaggggagataataaggagggctgctgggtgagggcctggagatgtggaaccctggagtggaaggttctccagtgacagtgtcctgtgactgcaaaaggggacaagaaaatccctcttcctccatgggatggatttaagctcttgctgtgtgttctacaaatgctgttattgtgggaggaaatgctaggtttttgtgtgtggactgcccagacctcagccaggtcttctggagatgacatttgaggactgatggccaaagagcatgggggactgaagccctggctgcctcagcgctctgtctcccaacaccagctggtgttgcagagggaggtcaacgtgagtttggatctcttgtacgcagatgtaatcattcacatgtaaaaataaccccacctccccaccccaaaaagggcaagagctgtggaaaatgattgccaaatgagatggctggttagagcatgattttttctaaagcatacttcatatattttcttaagattacatcaagctaattgtgcgagctcaattcactttgtaagaaaactctcggagaaataaaatcaataaaaagccaaaaaaaaaaataag

SEQ ID NO: 144 - DNA, 2088 bp, Homo sapiens
  ref <308>: DATABASE ACCESSION NUMBER: NM_004603
catgaaggaccgaacccaggagctccgcacggccaaggacagcgatgatgatgatgatgtcgctgtcaccgtggaccgagaccgcttcatggatgagttctttgagcaggtggaggagattcgaggcttcattgacaagatcgcagagaacgtggaggaggtgaagcggaagcacagtgccatcctggcatcccccaaccccgatgagaagacgaaggaggagctggaagaactcatgtccgacataaagaagacagcaaacaaagttcgttccaagttaaagagcatcgagcagtccatcgagcaagaggaaggcctgaaccgctcctccgctgacctgaggatccggaagacacagcactccacgctgtccagaaagtttgtggaggtcatgtcggagtacaacgccacgcagtccgactaccgcgagcgctgcaaaggccgcatccagaggcagctggagatcaccggcaggaccacgaccagtgaggagctggaggacatgctggagagtgggaaccccgccatctttgcctctgggatcatcatggactccagcatctcgaagcaggctctgagcgagattgagacgcggcacagtgagatcatcaagctggagaacagcatccgtgagctacacgacatgttcatggacatggccatgctcgtggagagccagggagagatgattgacaggatcgagtacaatgtggaacacgcggtagactatgtggagagggccgtgtctgacaccaagaaggccgtcaagtaccagagcaaggcgcgccggaagaaaatcatgatcatcatctgctgtgtgatcctgggcatcgtcatcgcctccactgttgggggcatcttcgcctagaagccacccaaactgccactccactccaggtgggccactccaaggaggccctggctgctgccacctggctgggctgccctcccaacccccgcctctggctcagagcaccctccctcccggcccccatgctcccttctctgccatgggccctccgtccccgccccgtgtcgtgtgcatgatctctgtgagtgtgcgtctgtacgggaagaggcagagggaggcagccagcggggcgtgatgcagtgtgcacagcgaggagcagacccaggcagggccgccagggtgacacaggccacgcttccttgccttcagtaactcggtgggcccaggttctgctcttccctggggaccctaacctcgcctccagctgacctgccctgtcctctccagctgtccccacaagcagagccctgaggggtggggaccagctggccacatggtgctgcttttcaggttaggggagaggtgaccctgagggacagcccagctctgagtctcagtcgctgatcactgccagggaggctcaggctgccatggctccaggctccctcccctgcctaggggcaaagtccatcgggtcctgggcctcagcttcccttcccacattcctccggccccaggagcaaccccttgggctaggtctgaccccaggtgtccctctggaaggggctggctggtgccctatttccagccaccccagcagctagggaggcaaagcaggctgcagtcagtccctcaagccagcgttgcatgtttgggatggtggctcctgttgtcttgcgctctgggaagtcagatgtcatttcaggcctgcagtctcatcctgcccttgccatcctcccatcgatgtgccacgtgggtgtcacgtgtcccagatgcagtattcggcagccagccggggagggctacctcctcctcctcaccaccttggggcttctcatgggaaatgtgcccccgccccaggaccctctcccttgtggacaggcagggagatgcatgcgagtgcatgcagcaggggatggggccgtgtccgtgtgccccaccctccctcggctttactcctgcccagtgactgtgaccactgtccgtgttgccttcttgaacagcgattccccccaaccccttcaccaaaggtcttggtacaaccagctgcccattttgtgaaatttttatgtagaataaacatttgtatctgtaaaaaaaaaaaaaaaaaagcgttc

SEQ ID NO: 145 - DNA, 1813 bp, Homo sapiens
  ref <308>: DATABASE ACCESSION NUMBER: NM_004615
cccctcccgcgcgcccgcccgccgcctgccgccgccgccgccgccgccggagctctgtagtatggcatcgaggagaatggagaccaaacctgtgataacctgtctcaaaaccctcctcatcatctactccttcgtcttctggatcactggggtgatcctgctggctgttggagtctggggcaaacttactctgggcacctatatctcccttattgccgagaactccacaaatgctccctatgtgctcatcggaactggcaccactattgttgtctttggcctgtttggatgctttgctacatgtcgtggtagcccatggatgctgaaactgtatgccatgtttctgtccctggtgttcctggctgagctcgtagctggcatttcagggtttgtgtttcgtcatgagatcaaggacaccttcctgaggacttacacggacgctatgcagacttacaatggcaatgatgagaggagccgggcagtggaccatgtgcagcgcagcctgagctgctgtggtgtgcagaactacaccaactggagcaccagcccctacttcctggagcatggcatcccccccagctgctgcatgaacgaaactgattgtaatccccaggatctacacaatctgactgtggccgccaccaaagttaaccagaagggttgttatgatctggtaactagtttcatggagactaacatgggaatcatcgctggagtggcgtttggaatcgcattctcccagttaattggcatgctgctggcctgctgtctgtcccggttcatcacggccaatcagtatgagatggtgtaaggagaagtctttcaagaatgacggaataagagacctgttttaaaaaggaactgcagcaatctttgaaagacttccaaagaatgttagagcacagtacataatacacttgccctgctccctctaccccttaccccacaacgtgcaactgacactcccacccagtctctgctccacctttcagcccacgtcacgtgtagtgtccattttgtgaagccctgttgtgccacagagtgtagccaggtccccctgcagctagtcctagtgaacctcaccccgaggccctgcatgggccagcccctccatctgtacttggtccaactgcaactcatcatcggtgactggttatcacaccatcgctggcccctttgggccctgcatgtagtgtgggaggctcctgttagctcctcactgtggtaaatgccacacacctttaagtagataagcagacgatagttatctgttcttttgacttaatctcatttggtttgattttccctctactaaggctttcctaccttcttcaggctgcctaagacatgtaacgaaacacttcaataattgtccatgaggagaaaaaaagcatgtgtcatgcatgaaggaaactgaacttgaggtggcctccttgcttgttacatacctgggtatgtgtaggcagtttagtgcatctttgcctctcagttgaaacctgtataaccctgttacaaagctgtgttgttgcttcttgtgaaggccatgatattttgtttttccccaattaattgctattgtgttattttactacttctctctgtattttttcttgcattgacattatagacattgaggacctcatccaaacaatttaaaaatgagtgtgaagggggaacaagtcaaaatatttttaaaagatcttcaaaaataatgcctctgtctagcatgccaacaagaatgcattgatattgtgaacatttgtgatatatgtattaataaatagagcaattacaagcaaaaaaaaaaaaaaaa

SEQ ID NO: 146 - DNA, 4607 bp, Homo sapiens
  ref <308>: DATABASE ACCESSION NUMBER: NM_004631
gctggcggcggccgcccagggccggggccgcgcgcccagcctgagcccgccccgccgccgagcgtcaccgaacctgcttgaaatgcagccgaggagccggggcgggcggcagcggcggcggcggcggcggcgggggcagcggcaaccccggcgccgcggcaaggactcggagggctgagacgcggcggcggcggcgcggggagcgcggggcgcggcggccggagcccgggcccgccatgggcctccccgagccgggccctctccggcttctggcgctgctgctgctgctgctgctgctgctgctgctgcggctccagcatcttgcggcggcagcggctgatccgctgctcggcggccaagggccggccaaggagtgcgaaaaggaccaattccagtgccggaacgagcgctgcatcccctctgtgtggagatgcgacgaggacgatgactgcttagaccacagcgacgaggacgactgccccaagaagacctgtgcagacagtgacttcacctgtgacaacggccactgcatccacgaacggtggaagtgtgacggcgaggaggagtgtcctgatggctccgatgagtccgaggccacttgcaccaagcaggtgtgtcctgcagagaagctgagctgtggacccaccagccacaagtgtgtacctgcctcgtggcgctgcgacggggagaaggactgcgagggtggagcggatgaggccggctgtgctaccttgtgcgccccgcacgagttccagtgcggcaaccgctcgtgcctggccgccgtgttcgtgtgcgacggcgatgacgactgtggtgacggcagcgatgagcgcggctgtgcagacccggcctgcgggccccgcgagttccgctgcggcggcgatggcggcggcgcctgcatcccggagcgctgggtctgcgaccgccagtttgactgcgaggaccgctcggacgaggcagccgagctctgcggccgcccgggccccggggccacgtccgcgcccgccgcctgcgccaccgtctcccagttcgcctgccgcagcggcgagtgcgtgcacctgggctggcgctgcgacggcgaccgcgactgcaaagacaaatcggacgaggccgactgcccactgggcacctgccgtggggacgagttccagtgtggggatgggacatgtgtccttgcaatcaagcactgcaaccaggagcaggactgtccagatgggagtgatgaagctggctgcctacaggggctgaacgagtgtctgcacaacaatggcggctgctcacacatctgcactgacctcaagattggctttgaatgcacgtgcccagcaggcttccagctcctggaccagaagacctgtggcgacattgatgagtgcaaggacccagatgcctgcagccagatctgtgtcaattacaagggctattttaagtgtgagtgctaccctggctacgagatggacctactgaccaagaactgcaaggctgctggtggaaagagcccatccctaatcttcaccaaccggtacgaggtgcggaggatcgacctggtgaagcggaactattcacgcctcatccccatgctcaagaatgtcgtggcactagatgtggaagttgccaccaatcgcatctactggtgtgacctctcctaccgtaagatctatagcgcctacatggacaaggccagtgacccgaaagagcaggaggtcctcattgacgagcagttgcactctccagagggcctggcagtggactgggtccacaagcacatctactggactgactcgggcaataagaccatctcagtggccacagttgatggtggccgccgacgcactctcttcagccgtaacctcagtgaaccccgggccatcgctgttgaccccctgcgagggttcatgtattggtctgactggggggaccaggccaagattgagaaatctgggctcaacggtgtggaccggcaaacactggtgtcagacaatattgaatggcccaacggaatcaccctggatctgctgagccagcgcttgtactgggtagactccaagctacaccaactgtccagcattgacttcagtggaggcaacagaaagacgctgatctcctccactgacttcctgagccacccttttgggatagctgtgtttgaggacaaggtgttctggacagacctggagaacgaggccattttcagtgcaaatcggctcaatggcctggaaatctccatcctggctgagaacctcaacaacccacatgacattgtcatcttccatgagctgaagcagccaagagctccagatgcctgtgagctgagtgtccagcctaatggaggctgtgaatacctgtgccttcctgctcctcagatctccagccactctcccaagtacacatgtgcctgtcctgacacaatgtggctgggtccagacatgaagaggtgctaccgagcacctcaatctacctcaactacgacgttagcttctaccatgacgaggacagtacctgccaccacaagagcccccgggaccaccgtccacagatccacctaccagaaccacagcacagagacaccaagcctgacagctgcagtcccaagctcagttagtgtccccagggctcccagcatcagcccgtctaccctaagccctgcaaccagcaaccactcccagcactatgcaaatgaagacagtaagatgggctcaacagtcactgccgctgttatcgggatcatcgtgcccatagtggtgatagccctcctgtgcatgagtggatacctgatctggagaaactggaagcggaagaacaccaaaagcatgaattttgacaacccagtctacaggaaaacaacagaagaagaagatgaagatgagctccatatagggagaactgctcagattggccatgtctatcctgcagcaatcagcagctttgatcgcccactgtgggcagagccctgtcttggggagaccagagaaccggaagacccagcccctgccctcaaggagctttttgtcttgccgggggaaccaaggtcacagctgcaccaactcccgaagaaccctctttccgagctgcctgtcgtcaaatccaagcgagtggcattaagccttgaagatgatggactaccctgaggatgggatcacccccttcgtgcctcatggaattcagtcccatgcactacactctggatggtgtatgactggatgaatgggtttctatatatgggtctgtgtgagtgtatgtgtgtgtgtgattttttttttaaatttatgttgcggaaaggtaaccacaaagttatgatgaactgcaaacatccaaaggatgtgagagtttttctatgtataatgttttatacactttttaactggttgcactacccatgaggaattcgtggaatggctactgctgactaacatgatgcacataaccaaatgggggccaatggcacagtaccttactcatcatttaaaaactatatttacagaagatgtttggttgctgggggggcttttttgggttttggggcatttgttttttgtaaataagatgattatgctttgtggctatccatcaacataagtaaaaaaaaaaaaaaaacacttcaactccctcccccatttagattatttattaacatattttaaaaatcagatgagttctataaataatttagagaagtgagagtatttatttttggcatgtttggcccaccacacagactctgtgtgtgtatgtgtgtgtttatatgtgtatgtgtgtgacaggaaaatctgtagagaagaggcacatctatggctactgttcaaatacataaagataaatttattttcacacagtccacaaggggtatatcttgtagttttcagaaaagcctttggaaatctggatcaggaaatagataccatggtttgtgcaattatgtagtaaaaaaggcaaatcttttcacctctggctattcctgagaccccaggaagtcaggaaaagcctttcagctcacccatggctgctgtgactcctaccagggctttcttggctttggcgaaggtcagtgtacagacattccatggtaccagagtgctcagaaagtcaagataggatatgcctcaccctcagctactccttgttttaaagttcagctctttgagtaacttcttcaatttctttcaggacacttgggttgaattcagtaagtttcctctgaagcaccctgaagggtgccatccttacagagctaagtggagacgtttccagatcagcccaagtttactatagagactggcccaggcactgaatgtctaggacatgctgtggatgaagataaagatggtggaataggttttatcacatctcttatttctcttttccccttactctctaccatttcctttatgtggggaaacattttaaggtaataaataggttacttaccatcatatgttcatatagatgaaactaatttttggcttaagtcagaacaactggcccccaattgaagtcatatttgtggggggaaatggcatacgcaatattatattatattggatatttatgttcacacaggaatttggtttactgctttgtaaataaaagggaaaactccgggtatatgt

SEQ ID NO: 147 - DNA, 1627 bp, Homo sapiens
  ref <308>: DATABASE ACCESSION NUMBER: NM_004642
gcccccaccatcaaggggaagaaagtgctcttcggattccggttcgccctggcctcccgcagccgccgcgggaccggcccccagcacacccccggggcgccgggcgcggggcagccgcccggacgcgcgcgggcctcaggcgccgccgggaccccagccccccaaactttggcaagttgcgggcgccgagcgcacccggaggcgcggggcgcggccgcaggcggagccgccccctgacgccgggccgccccctcccggccccggccgccccgccggctccgcggaaagtttgcggccgcccctgcgccgcacccggggcctgggtgagactgcggcggcggcagggcgcggacggccatatttgccggcgcggcccgagccgccgacaacaaaaagtgcgcgggcgctcggcgggcgctcggacgggcgcggggctgcagcgctaccgcccggcctcgccgccgccgccgccgccctcgcggcctggccccgccgcgcccggcgcgcccgccgcccggggggatgtcttacaaaccgaacttggccgcgcacatgcccgccgccgccctcaacgccgctgggagtgtccactcgccttccaccagcatggcaacgtcttcacagtaccgccagctgctcagtgactacgggccaccgtccctaggctacacccagggaactgggaacagccaggtgccccaaagcaaatacgcggagctgctggccatcattgaagagctggggaaggagatcagacccacgtacgcagggagcaagagtgccatggagaggctgaagcgcggcatcattcacgctagaggactggttcgggagtgcttggcagaaacggaacggaatgccagatcctagctgccttgttggttttgaaggatttccatctttttacaagatgagaagttacagttcatctcccctgttcagatgaaacccttgttttcaaaatggttacagtttcgtttttcctcccatggttcacttggctctgaacctacagtctcaaagattgagaaaagattttgcagttaattaggatttgcattttaagtagttaggaactgcccaggttttttttgttttttaagcattgatttaaaagatgcacggaaagttatcttacagcaaactgtagtttgcctccaagacaccattgtctccctttaatcttctcttttgtatacatttgttacccatggtgttctttgttccttttcataagctaataccactgtagggattttgttttgaacgcatattgacagcacgctttacttagtagccggttcccatttgccatacaatgtaggttctgcttaatgtaacttcttttttgcttaagcatttgcatgactattagtgcttcaaagtcaatttttaaaaatgcacaagttataaatacagaagaaagagcaacccaccaaacctaacaaggacccccgaacactttcatactaagactgtaagtagatctcagttctgcgtttattgtaagttgataaaaacatctggaagaaaatgactaaaactgtttgcatctttgtatgtatttattacttgatgtaataaagcttattttcattaacaatttgtattaaaaaaaaaaaaaaaa

SEQ ID NO: 148 - DNA, 1530 bp, Homo sapiens
  ref <308>: DATABASE ACCESSION NUMBER: NM_004701
aatcctggaacaaggctacagcgtcgaagatccccagcgctgcgggctcggagagcagtcctaacggcgcctcgtacgctagtgtcctcccttttcagtccgcgtccctccctgggccgggctggcactcttgccttccccgtccctcatggcgctgctccgacgcccgacggtgtccagtgatttggagaatattgacacaggagttaattctaaagttaagagtcatgtgactattaggcgaactgttttagaagaaattggaaatagagttacaaccagagcagcacaagtagctaagaaagctcagaacaccaaagttccagttcaacccaccaaaacaacaaatgtcaacaaacaactgaaacctactgcttctgtcaaaccagtacagatggaaaagttggctccaaagggtccttctcccacacctgaggatgtctccatgaaggaagagaatctctgccaagctttttctgatgccttgctctgcaaaatcgaggacattgataacgaagattgggagaaccctcagctctgcagtgactacgttaaggatatctatcagtatctcaggcagctggaggttttgcagtccataaacccacatttcttagatggaagagatataaatggacgcatgcgtgccatcctagtggattggctggtacaagtccactccaagtttaggcttctgcaggagactctgtacatgtgcgttggcattatggatcgatttttacaggttcagccagtttcccggaagaagcttcaattagttgggattactgctctgctcttggcttccaagtatgaggagatgttttctccaaatattgaagactttgtttacatcacagacaatgcttataccagttcccaaatccgagaaatggaaactctaattttgaaagaattgaaatttgagttgggtcgacccttgccactacacttcttaaggcgagcatcaaaagccggggaggttgatgttgaacagcacactttagccaagtatttgatggagctgactctcatcgactatgatatggtgcattatcatccttctaaggtagcagcagctgcttcctgcttgtctcagaaggttctaggacaaggaaaatggaacttaaagcagcagtattacacaggatacacagagaatgaagtattggaagtcatgcagcacatggccaagaatgtggtgaaagtaaatgaaaacttaactaaattcatcgccatcaagaataagtatgcaagcagcaaactcctgaagatcagcatgatccctcagctgaactcaaaagccgtcaaagaccttgcctccccactgataggaaggtcctaggctgccgtgggccctggggatgtgtgcttcattgtgccctttttcttattggtttagaactcttgattttgtacatagtcctctggtctatctcatgaaacctcttctcagaccagttttctaaacatatattgaggaaaaataaagcgattggtttttcttaaggtaaaaaaaaaaaaaaaaaa

SEQ ID NO: 149 - DNA, 5809 bp, Homo sapiens
  ref <308>: DATABASE ACCESSION NUMBER: NM_004774
gggaagatggcggcggcctcgagcacccttctcttcttgccgccggggacttcagattgatccttcccgggaagagtagggactgctggtgccctgcgtcccgggatcccgagccaacttgtttcctccgttagtggtggggaagggcttatccttttgtggcggatctagcttctcctcgccttcaggatgaaagctcagggggaaaccgaggagtcagaaaagctgagtaagatgagttctctcctggaacggctccatgcaaaatttaaccaaaatagaccctggagtgaaaccattaagcttgtgcgtcaagtcatggagaagagggttgtgatgagttctggagggcatcaacatttggtcagctgtttggagacattgcagaaggctctcaaagtaacatctttaccagcaatgactgatcgtttggagtccatagcaagacagaatggactgggctctcatctcagtgccagtggcactgaatgttacatcacgtcagatatgttctatgtggaagtgcagttagatcctgcaggacagctttgtgatgtaaaagtggctcaccatggggagaatcctgtgagctgtccggagcttgtacagcagctaagggaaaaaaattttgatgaattttctaagcaccttaagggccttgttaatctgtataaccttccaggggacaacaaactgaagactaaaatgtacttggctctccaatccttagaacaagatctttctaaaatggcaattatgtactggaaagcaactaatgctggtcccttggataagattcttcatggaagtgttggctatctcacaccaaggagtgggggtcatttaatgaacctgaagtactatgtctctccttctgacctactggatgacaagactgcatctcccatcattttgcatgagaataatgtttctcgatctttgggcatgaatgcatcagtgacaattgaaggaacatctgctgtgtacaaactcccaattgcaccattaattatggggtcacatccagttgacaataaatggaccccttccttctcctcaatcaccagtgccaacagtgttgatcttcctgcctgtttcttcttgaaatttccccagccaatcccagtatctagagcatttgttcagaaactgcagaactgcacaggaattccattgtttgaaactcaaccaacttatgcacccctgtatgaactgatcactcagtttgagctatcaaaggaccctgaccccatacctttgaatcacaacatgagattttatgctgctcttcctggtcagcagcactgctatttcctcaacaaggatgctcctcttccagatggccgaagtctacagggaacccttgttagcaaaatcacctttcagcaccctggccgagttcctcttatcctaaatctgatcagacaccaagtggcctataacaccctcattggaagctgtgtcaaaagaactattctgaaagaagattctcctgggcttctccaatttgaagtgtgtcctctctcagagtctcgtttcagcgtatcttttcagcaccctgtgaatgactccctggtgtgtgtggtaatggatgtgcaggactcaacacatgtgagctgtaaactctacaaagggctgtcggatgcactgatctgcacagatgacttcattgccaaagttgttcaaagatgtatgtccatccctgtgacgatgagggctattcggaggaaagctgaaaccattcaagccgacaccccagcactgtccctcattgcagagacagttgaagacatggtgaaaaagaacctgcccccggctagcagcccagggtatggcatgaccacaggcaacaacccaatgagtggtaccactacaccaaccaacacctttccggggggtcccattaccaccttgtttaatatgagcatgagcatcaaagatcggcatgagtcggtgggccatggggaggacttcagcaaggtgtctcagaacccaattcttaccagtttgttgcaaatcacagggaacggggggtctaccattggctcgagtccgacccctcctcatcacacgccgccacctgtctcttcgatggccggcaacaccaagaaccacccgatgctcatgaaccttcttaaagataatcctgcccaggatttctcaaccctttatggaagcagccctttagaaaggcagaactcctcttccggctcaccccgcatggaaatatgctcggggagcaacaagaccaagaaaaagaagtcatcaagattaccacctgagaaaccaaagcaccagactgaagatgactttcagagggagctattttcaatggatgttgactcacagaaccctatctttgatgtcaacatgacagctgacacgctggatacgccacacatcactccagctccaagccagtgtagcactcccccaacaacttacccacaaccagtacctcacccccaacccagtattcaaaggatggtccgactatccagttcagacagcattggcccagatgtaactgacatcctttcagacattgcagaagaagcttctaaacttcccagcactagtgatgattgcccagccattggcacccctcttcgagattcttcaagctctgggcattctcagagtaccctgtttgactctgatgtctttcaaactaacaataatgaaaatccatacactgatccagctgatcttattgcagatgctgctggaagccccagtagtgactctcctaccaatcatttttttcatgatggagtagatttcaatcctgatttattgaacagccagagccaaagtggttttggagaagaatattttgatgaaagcagccaaagtggggataatgatgatttcaaaggatttgcatctcaggcactaaatactttgggggtgccaatgcttggaggtgataatggggagaccaagtttaagggcaataaccaagccgacacagttgatttcagtattatttcagtagccggcaaagctttagctcctgcagatcttatggagcatcacagtggtagtcagggtcctttactgaccactggggacttagggaaagaaaagactcaaaagagggtaaaggaaggcaatggcaccagtaatagtactctctcggggcccggattagacagcaaaccagggaagcgcagtcggaccccttctaatgatgggaaaagcaaagataagcctccaaagcggaagaaggcagacactgagggaaagtctccatctcatagttcttctaacagaccttttaccccacctaccagtacaggtggatctaaatcgccaggcagtgcaggaagatctcagactcccccaggtgttgccacaccacccattcccaaaatcactattcagattcctaagggaacagtgatggtgggcaagccttcctctcacagtcagtataccagcagtggttctgtgtcttcctcaggcagcaaaagccaccatagccattcttcctcctcttcctcatctgcttccacctcagggaagatgaaaagcagtaaatcagaaggttcatcaagttccaagttaagtagcagtatgtattctagccaggggtcttctggatctagccagtccaaaaattcatcccagtctggggggaagccaggctcctctcccataaccaagcatggactgagcagtggctctagcagcaccaagatgaaacctcaaggaaagccatcatcacttatgaatccttctttaagtaaaccaaacatatccccttctcattcaaggccacctggaggctctgacaagcttgcctctccaatgaagcctgttcctggaactcctccatcctctaaagccaagtcccctatcagttcaggttctggtggttctcatatgtctggaactagttcaagctctggcatgaagtcatcttcagggttaggatcctcaggctcgttgtcccagaaaactcccccatcatctaattcctgtacggcatcttcctcctccttttcctcaagtggctcttccatgtcatcctctcagaaccagcatgggagttctaaaggaaaatctcccagcagaaacaagaagccgtccttgacagctgtcatagataaactgaagcatggggttgtcaccagtggccctgggggtgaagacccactggacggccagatgggggtgagcacaaattcttccagccatcctatgtcctccaaacataacatgtcaggaggagagtttcagggcaagcgtgagaaaagtgataaagacaaatcaaaggtttccacctccgggagttcagtggattcttctaagaagacctcagagtcaaaaaatgtggggagcacaggtgtggcaaaaattatcatcagtaagcatgatggaggctcccctagcattaaagccaaagtgactttgcagaaacctggggaaagtagtggagaagggcttaggcctcaaatggcttcttctaaaaactatggctctccactcatcagtggttccactccaaagcatgagcgtggctctcccagccatagtaagtcaccagcatataccccccagaatctggacagtgaaagtgagtcaggctcctccatagcagagaaatcttatcagaatagtcccagctcagacgatggtatccgaccacttccagaatacagcacagagaaacataagaagcacaaaaaggaaaagaagaaagtaaaagacaaagatagggaccgagaccgggacaaagaccgagacaagaaaaaatctcatagcatcaagccagagagttggtccaaatcacccatctcttcagaccagtccttgtctatgacaagtaacacaatcttatctgcagacagaccctcaaggctcagcccagactttatgattggggaggaagatgatgatcttatggatgtggccctgattgggaattaggaaccttatttcctaaaagaaacagggccagaggaaaaaaaactattgataagtttataggcaaaccaccataaggggtgagtcagacaggtctgatttggttaagaatcctaaatggcatggctttgacatcaagctgggtgaattagaaaggcatatccagaccctattaaagaaaccacagggtttgattctggttaccaggaagtcttctttgttcctgtgccagaaagaaagttaaaatacttgcttaagaaagggaggggggtgggaggggtgtagggagagggaagggagggaaacagttttgtgggaaatattcatatatattttcttctccctttttccatttttaggccatgttttaaactcattttagtgcatgtatatgaagggctgggcagaaaatgaaaaagcaatacattccttgatgcatttgcatgaaggttgttcaactttgtttgaggtagttgtccgtttgagtcatgggcaaatgaaggactttggtcattttggacacttaagtaatgtttggtgtctgtttcttaggagtgactgggggagggaagattattttagctatttatttgtaatattttaaccctttatctgtttgtttttatacagtgtttcgttctaaatctatgaggtttagggttcaaaatgatggaaggccgaagagcaaggcttatatggtggtagggagcttatagcttgtgctaatactgtagcatcaagcccaagcaaattagtcagagcccgcctttagagttaaatataatagaaaaaccaaaatgatatttttattttaggagggtttaaatagggttcagagatcataggaatattaggagttacctctctgtggaggtat

SEQ ID NO: 150 - DNA, 4950 bp, Homo sapiens
  ref <308>: DATABASE ACCESSION NUMBER: NM_004787
cagagcagggtggagagggcggtgggaggcgtgtgcctgagtgggctctactgccttgttccatattattttgtgcacattttccctggcactctgggttgctagccccgccgggcactgggcctcagacactgcgcggttccctcggagcagcaagctaaagaaagcccccagtgccggcgaggaaggaggcggcggggaaagatgcgcggcgttggctggcagatgctgtccctgtcgctggggttagtgctggcgatcctgaacaaggtggcaccgcaggcgtgcccggcgcagtgctcttgctcgggcagcacagtggactgtcacgggctggcgctgcgcagcgtgcccaggaatatcccccgcaacaccgagagactggatttaaatggaaataacatcacaagaattacgaagacagattttgctggtcttagacatctaagagttcttcagcttatggagaataagattagcaccattgaaagaggagcattccaggatcttaaagaactagagagactgcgtttaaacagaaatcaccttcagctgtttcctgagttgctgtttcttgggactgcgaagctatacaggcttgatctcagtgaaaaccaaattcaggcaatcccaaggaaagctttccgtggggcagttgacataaaaaatttgcaactggattacaaccagatcagctgtattgaagatggggcattcagggctctccgggacctggaagtgctcactctcaacaataacaacattactagactttctgtggcaagtttcaaccatatgcctaaacttaggacttttcgactgcattcaaacaacctgtattgtgactgccacctggcctggctctccgactggcttcgccaaaggcctcgggttggtctgtacactcagtgtatgggcccctcccacctgagaggccataatgtagccgaggttcaaaaacgagaatttgtctgcagtggtcaccagtcatttatggctccttcttgtagtgttttgcactgccctgccgcctgtacctgtagcaacaatatcgtagactgtcgtgggaaaggtctcactgagatccccacaaatcttccagagaccatcacagaaatacgtttggaacagaacacaatcaaagtcatccctcctggagctttctcaccatataaaaagcttagacgaattgacctgagcaataatcagatctctgaacttgcaccagatgctttccaaggactacgctctctgaattcacttgtcctctatggaaataaaatcacagaactccccaaaagtttatttgaaggactgttttccttacagctcctattattgaatgccaacaagataaactgccttcgggtagatgcttttcaggatctccacaacttgaaccttctctccctatatgacaacaagcttcagaccatcgccaaggggaccttttcacctcttcgggccattcaaactatgcatttggcccagaacccctttatttgtgactgccatctcaagtggctagcggattatctccataccaacccgattgagaccagtggtgcccgttgcaccagcccccgccgcctggcaaacaaaagaattggacagatcaaaagcaagaaattccgttgttcagctaaagaacagtatttcattccaggtacagaagattatcgatcaaaattaagtggagactgctttgcggatctggcttgccctgaaaagtgtcgctgtgaaggaaccacagtagattgctctaatcaaaagctcaacaaaatcccggagcacattccccagtacactgcagagttgcgtctcaataataatgaatttaccgtgttggaagccacaggaatctttaagaaacttcctcaattacgtaaaataaactttagcaacaataagatcacagatattgaggagggagcatttgaaggagcatctggtgtaaatgaaatacttcttacgagtaatcgtttggaaaatgtgcagcataagatgttcaagggattggaaagcctcaaaactttgatgttgagaagcaatcgaataacctgtgtggggaatgacagtttcataggactcagttctgtgcgtttgctttctttgtatgataatcaaattactacagttgcaccaggggcatttgatactctccattctttatctactctaaacctcttggccaatccttttaactgtaactgctacctggcttggttgggagagtggctgagaaagaagagaattgtcacgggaaatcctagatgtcaaaaaccatacttcctgaaagaaatacccatccaggatgtggccattcaggacttcacttgtgatgacggaaatgatgacaatagttgctccccactttctcgctgtcctactgaatgtacttgcttggatacagtcgtccgatgtagcaacaagggtttgaaggtcttgccgaaaggtattccaagagatgtcacagagttgtatctggatggaaaccaatttacactggttcccaaggaactctccaactacaaacatttaacacttatagacttaagtaacaacagaataagcacgctttctaatcagagcttcagcaacatgacccagctcctcaccttaattcttagttacaaccgtctgagatgtattcctcctcgcacctttgatggattaaagtctcttcgattactttctctacatggaaatgacatttctgttgtgcctgaaggtgctttcaatgatctttctgcattatcacatctagcaattggagccaaccctctttactgtgattgtaacatgcagtggttatccgactgggtgaagtcggaatataaggagcctggaattgctcgttgtgctggtcctggagaaatggcagataaacttttactcacaactccctccaaaaaatttacctgtcaaggtcctgtggatgtcaatattctagctaagtgtaacccctgcctatcaaatccgtgtaaaaatgatggcacatgtaatagtgatccagttgacttttaccgatgcacctgtccatatggtttcaaggggcaggactgtgatgtcccaattcatgcctgcatcagtaacccatgtaaacatggaggaacttgccacttaaaggaaggagaagaagatggattctggtgtatttgtgctgatggatttgaaggagaaaattgtgaagtcaacgttgatgattgtgaagataatgactgtgaaaataattctacatgtgtcgatggcattaataactacacatgcctttgcccacctgagtatacaggtgagttgtgtgaggagaagctggacttctgtgcccaggacctgaacccctgccagcacgattcaaagtgcatcctaactccaaagggattcaaatgtgactgcacaccagggtacgtaggtgaacactgcgacatcgattttgacgactgccaagacaacaagtgtaaaaacggagcccactgcacagatgcagtgaacggctatacgtgcatatgccccgaaggttacagtggcttgttctgtgagttttctccacccatggtcctccctcgtaccagcccctgtgataattttgattgtcagaatggagctcagtgtatcgtcagaataaatgagccaatatgtcagtgtttgcctggctatcagggagaaaagtgtgaaaaattggttagtgtgaattttataaacaaagagtcttatcttcagattccttcagccaaggttcggcctcagacgaacataacacttcagattgccacagatgaagacagcggaatcctcctgtataagggtgacaaagaccatatcgcggtagaactctatcgggggcgtgttcgtgccagctatgacaccggctctcatccagcttctgccatttacagtgtggagacaatcaatgatggaaacttccacattgtggaactacttgccttggatcagagtctctctttgtccgtggatggtgggaaccccaaaatcatcactaacttgtcaaagcagtccactctgaattttgactctccactctatgtaggaggcatgccagggaagagtaacgtggcatctctgcgccaggcccctgggcagaacggaaccagcttccacggctgcatccggaacctttacatcaacagtgagctgcaggacttccagaaggtgccgatgcaaacaggcattttgcctggctgtgagccatgccacaagaaggtgtgtgcccatggcacatgccagcccagcagccaggcaggcttcacctgcgagtgccaggaaggatggatggggcccctctgtgaccaacggaccaatgacccttgccttggaaataaatgcgtacatggcacctgcttgcccatcaatgcgttctcctacagctgtaagtgcttggagggccatggaggtgtcctctgtgatgaagaggaggatctgtttaacccatgccaggcgatcaagtgcaagcacgggaagtgcaggctttcaggtctggggcagccctactgtgaatgcagcagtggatacacgggggacagctgtgatcgagaaatctcttgtcgaggggaaaggataagagattattaccaaaagcagcagggctatgctgcttgccaaacaaccaagaaggtgtcccgattagagtgcagaggtgggtgtgcaggagggcagtgctgtggaccgctgaggagcaagcggcggaaatactctttcgaatgcactgacggctcctcctttgtggacgaggttgagaaagtggtgaagtgcggctgtacgaggtgtgtgtcctaaacacactcccggcagctctgtctttggaaaaggttgtatacttcttgaccatgtgggactaatgaatgcttcatagtggaaatatttgaaatatattgtaaaatacagaacagacttatttttattatgagaataaagactttttttctgcatttg

SEQ ID NO: 151 - DNA, 2719 bp, Homo sapiens
  ref <308>: DATABASE ACCESSION NUMBER: NM_004827
tttaggaacgcaccgtgcacatgcttggtggtcttgttaagtggaaactgctgctttagagtttgtttggaaggtccgggtgactcatcccaacatttacatccttaattgttaaagcgctgcctccgagcgcacgcatcctgagatcctgagcctttggttaagaccgagctctattaagctgaaaagataaaaactctccagatgtcttccagtaatgtcgaagtttttatcccagtgtcacaaggaaacaccaatggcttccccgcgacagtttccaatgacctgaaggcatttactgaaggagctgtgttaagttttcataacatctgctatcgagtaaaactgaagagtggctttctaccttgtcgaaaaccagttgagaaagaaatattatcgaatatcaatgggatcatgaaacctggtctcaacgccatcctgggacccacaggtggaggcaaatcttcgttattagatgtcttagctgcaaggaaagatccaagtggattatctggagatgttctgataaatggagcaccgcgacctgccaatttcaaatgtaattcaggttacgtggtacaagatgatgttgtgatgggcactctgacggtgagagaaaacttacagttctcagcagctcttcggcttgcaacaactatgacgaatcatgaaaaaaacgaacggattaacagggtcattgaagagttaggtctggataaagtggcagactccaaggttggaactcagtttatccgtggtgtgtctggaggagaaagaaaaaggactagtataggaatggagcttatcactgatccttccatcttgtccttggatgagcctacaactggcttagactcaagcacagcaaatgctgtccttttgctcctgaaaaggatgtctaagcagggacgaacaatcatcttctccattcatcagcctcgatattccatcttcaagttgtttgatagcctcaccttattggcctcaggaagacttatgttccacgggcctgctcaggaggccttgggatactttgaatcagctggttatcactgtgaggcctataataaccctgcagacttcttcttggacatcattaatggagattccactgctgtggcattaaacagagaagaagactttaaagccacagagatcatagagccttccaagcaggataagccactcatagaaaaattagcggagatttatgtcaactcctccttctacaaagagacaaaagctgaattacatcaactttccgggggtgagaagaagaagaagatcacagtcttcaaggagatcagctacaccacctccttctgtcatcaactcagatgggtttccaagcgttcattcaaaaacttgctgggtaatccccaggcctctatagctcagatcattgtcacagtcgtactgggactggttataggtgccatttactttgggctaaaaaatgattctactggaatccagaacagagctggggttctcttcttcctgacgaccaaccagtgtttcagcagtgtttcagccgtggaactctttgtggtagagaagaagctcttcatacatgaatacatcagcggatactacagagtgtcatcttatttccttggaaaactgttatctgatttattacccatgaggatgttaccaagtattatatttacctgtatagtgtacttcatgttaggattgaagccaaaggcagatgccttcttcgttatgatgtttacccttatgatggtggcttattcagccagttccatggcactggccatagcagcaggtcagagtgtggtttctgtagcaacacttctcatgaccatctgttttgtgtttatgatgattttttcaggtctgttggtcaatctcacaaccattgcatcttggctgtcatggcttcagtacttcagcattccacgatatggatttacggctttgcagcataatgaatttttgggacaaaacttctgcccaggactcaatgcaacaggaaacaatccttgtaactatgcaacatgtactggcgaagaatatttggtaaagcagggcatcgatctctcaccctggggcttgtggaagaatcacgtggccttggcttgtatgattgttattttcctcacaattgcctacctgaaattgttatttcttaaaaaatattcttaaatttccccttaattcagtatgatttatcctcacataaaaaagaagcactttgattgaagtattcaatcaagtttttttgttgttttctgttcccttgccatcacactgttgcacagcagcaattgttttaaagagatacatttttagaaatcacaacaaactgaattaaacatgaaagaacccaagacatcatgtatcgcatattagttaatctcctcagacagtaaccatggggaagaaatctggtctaatttattaatctaaaaaaggagaattgaattctggaaactcctgacaagttattactgtctctggcatttgtttcctcatctttaaaatgaataggtaggttagtagcccttcagtcttaatactttatgatgctatggtttgccattatttaatatatgacaaatgtattaatgctatactggaaatgtaaaattgaaaatatgttggaaaaaagattctgtcttatagggtaaaaaaagccaccggtgatagaaaaaaaatctttttgataagcacattaaagttaatagaactt

SEQ ID NO: 152 - DNA, 1791 bp, Homo sapiens
  ref <308>: DATABASE ACCESSION NUMBER: NM_004861
ggcagcctgggagttggacgtggctcaggcagtgggtagaaaggggcagccagccacagcccgagggtctcactgtgtcatccagagctggagtgcagcggcacagtcatggctcactggaactcaggctcaagcaatcctcccgcctcagccttccaagtaactaggactacaggcatgtgccaccacgcctggtgtctgagatgctgccaccgcagaagaagccctgggagtccatggctaaggggctggtgctgggcgcgctcttcactagtttcctgctgctggtgtactcctatgccgtgcccccgctgcatgccggcctggcctccacgaccccggaggccgcagcgtcctgctctccacctgcactcgagccagaggcagtgatccgggccaacggctcggcgggggagtgccagccgcggcgcaacatcgtgttcttgaagacgcacaagacggccagcagcaccctgctcaacatcctgttccgcttcggccagaagcaccggctcaagttcgccttccctaacggccgcaatgacttcgactacccgaccttcttcgcccgcagcctggtgcaggactatcggcccggggcctgcttcaacatcatctgcaaccacatgcgcttccactacgacgaggtgcgcggcctggtgccgaccaacgccatcttcatcacggtgctccgcgaccccgcccgcttgttcgagtcctccttccactacttcgggccggtggtgcccctcacgtggaagctctcggccggcgacaagctgaccgagttcctgcaagacccggatcgctactacgaccccaacggcttcaatgcccactacctccgaaacctgctcttcttcgacctgggctatgacaacagcctggaccccagcagcccgcaggtgcaggagcacatcctggaggtggagcgtcgcttccacctggtgctccttcaagagtacttcgacgagtcgctggtgctgctgaaggacctgctgtgctgggagctggaggacgtgctctacttcaagctcaacgcccgccgcgactcgcccgtgccgcggctctcgggggagctgtatgggcgcgccaccgcctggaacatgctggactcccacctctaccgccacttcaacgccagcttctggcgcaaggtggaggccttcgggcgggagcgcatggcccgcgaggtggccgccctgcgccatgccaacgagcgcatgcggaccatctgcatcgacgggggccacgccgtggacgccgccgccatccaggacgaggccatgcagccctggcagccgctgggcaccaagtccatcctgggctacaacctcaagaagagcatcgggcagcggcacgcgcagctctgccggcgcatgctcacgcccgagatccagtacctgatggacctcggcgccaacctgtgggtcaccaagctctggaagttcattcgcgatttcctgcggtggtgacgtcccaccgcccagcggcttgcctgcctgctcgctccctgcagaggggctgagcaggacgccgctggtgctggccgcccccagccccctcctggtgccacctcagaccccggggtgagggggggctccctggggggaggcagccagccaagactgggcccatgaacacagagagggcctaaccgagatcagtatttaactaattataccagtttttattaaacccctttccctccccgataaagaatgttctatttctgcctccccttaaaggggagacctcagaagtaaaggaatttgatgttgtgtttttgtt

SEQ ID NO: 153 - DNA, 1633 bp, Homo sapiens
  ref <308>: DATABASE ACCESSION NUMBER: NM_004867
gtgctgtttgggctaacaggatctcctcttgcagtctgcagcccaggacgctgattccagcagcgccttaccgcgcagcccgaagattcactatggtgaaaatcgccttcaatacccctaccgccgtgcaaaaggaggaggcgcggcaagacgtggaggccctcctgagccgcacggtcagaactcagatactgaccggcaaggagctccgagttgccacccaggaaaaagagggctcctctgggagatgtatgcttactctcttaggcctttcattcatcttggcaggacttattgttggtggagcctgcatttacaagtacttcatgcccaagagcaccatttaccgtggagagatgtgcttttttgattctgaggatcctgcaaattcccttcgtggaggagagcctaacttcctgcctgtgactgaggaggctgacattcgtgaggatgacaacattgcaatcattgatgtgcctgtccccagtttctctgatagtgaccctgcagcaattattcatgactttgaaaagggaatgactgcttacctggacttgttgctggggaactgctatctgatgcccctcaatacttctattgttatgcctccaaaaaatctggtagagctctttggcaaactggcgagtggcagatatctgcctcaaacttatgtggttcgagaagacctagttgctgtggaggaaattcgtgatgttagtaaccttggcatctttatttaccaactttgcaataacagaaagtccttccgccttcgtcgcagagacctcttgctgggtttcaacaaacgtgccattgataaatgctggaagattagacacttccccaacgaatttattgttgagaccaagatctgtcaagagtaagaggcaacagatagagtgtccttggtaataagaagtcagagatttacaatatgactttaacattaaggtttatgggatactcaagatatttactcatgcatttactctattgcttatgctttaaaaaaaggaaaaaaaaaaaaactactaaccactgcaagctcttgtcaaattttagtttaattggcattgcttgttttttgaaactgaaattacctgagtttcattttttctttgaatttatagggtttagatttctgaaagcagcatgaatatatcacctaacatcctgacaataaattccatccgttgttttttttgtttgtttgttttttcttttcctttaagtaagctctttattcatcttatggtgcagcaattttaaaatttgaaatattttaaattgtttttgaactttttgtgtaaaatatatcagatctcaacattgttggtttcttttgtttttcattttgtacaactttcttgaatttagaaattacatctttgcagttctgttaggtgctctgtaattaacctgacttatatgtgaacaattttcatgagacagtcatttttaactaatgcagtgattctttctcactactatctgtattgtggaatgcacaaaattgtgtaggtgctgaatgctgtaaggagtttaggttgtatgaattctacaaccctataataaattttactctatacaaaaaaaaaaaaaaaaaaaaaaaaaaaaaaaaaaaaaaaaaaaa

SEQ ID NO: 154 - DNA, 1968 bp, Homo sapiens
  ref <308>: DATABASE ACCESSION NUMBER: NM_004887
aatgtgtgcgcgctgtggtatgggtgtgcaagtgtgcgaaggcggcgtgttgtgtgagcgagagggtagcggatgtgtgtgtgcgtgtgcgcgcgtggctccgggtgtgcgccgctgcgatagcgggtcctttcccggggcgggcgacgggcgggctgggaaggtctcctcccctcaccacattgagaaatctcagtgagtcaccgagtggttctgcatattaatgagctcgctcgctgcgagggcaggagcggatttaaaagaggccagggcgggcggagggaggctgtggagagagcgcggagacaagcgcagagcgcagcgcacggccacagacagccctgggcatccaccgacggcgcagccggagccagcagagccggaaggcgcgccccgggcagagaaagccgagcagagctgggtggcgtctccgggccgccgctccgacgggccagcgccctccccatgtccctgctcccacgccgcgcccctccggtcagcatgaggctcctggcggccgcgctgctcctgctgctgctggcgctgtacaccgcgcgtgtggacgggtccaaatgcaagtgctcccggaagggacccaagatccgctacagcgacgtgaagaagctggaaatgaagccaaagtacccgcactgcgaggagaagatggttatcatcaccaccaagagcgtgtccaggtaccgaggtcaggagcactgcctgcaccccaagctgcagagcaccaagcgcttcatcaagtggtacaacgcctggaacgagaagcgcagggtctacgaagaatagggtgaaaaacctcagaagggaaaactccaaaccagttgggagacttgtgcaaaggactttgcagattaaaaaaaaaaaaaaaaaaaaaaaaaaaaaaaaaaaaaaaaaagcctttctttctcacaggcataagacacaaattatatattgttatgaagcactttttaccaacggtcagtttttacattttatagctgcgtgcgaaaggcttccagatgggagacccatctctcttgtgctccagacttcatcacaggctgctttttatcaaaaaggggaaaactcatgcctttcctttttaaaaaatgcttttttgtatttgtccatacgtcactatacatctgagctttataagcgcccgggaggaacaatgagcttggtggacacatttcattgcagtgttgctccattcctagcttgggaagcttccgcttagaggtcctggcgcctcggcacagctgccacgggctctcctgggcttatggccggtcacagcctcagtgtgactccacagtggcccctgtagccgggcaagcaggagcaggtctctctgcatctgttctctgaggaactcaagtttggttgccagaaaaatgtgcttcattcccccctggttaatttttacacaccctaggaaacatttccaagatcctgtgatggcgagacaaatgatccttaaagaaggtgtggggtctttcccaacctgaggatttctgaaaggttcacaggttcaatatttaatgcttcagaagcatgtgaggttcccaacactgtcagcaaaaaccttaggagaaaacttaaaaatatatgaatacatgcgcaatacacagctacagacacacattctgttgacaagggaaaaccttcaaagcatgtttctttccctcaccacaacagaacatgcagtactaaagcaatatatttgtgattccccatgtaattcttcaatgttaaacagtgcagtcctctttcgaaagctaagatgaccatgcgccctttcctctgtacatatacccttaagaacgccccctccacacactgccccccagtatatgccgcattgtactgctgtgttatatgctatgtacatgtcagaaaccattagcattgcatgcaggtttcatattctttctaagatggaaagtaataaaatatatttgaaatgta

SEQ ID NO: 155 - DNA, 1079 bp, Homo sapiens
  ref <308>: DATABASE ACCESSION NUMBER: NM_004944
gaattcggcacgagagcactccaagcactgctgtcttctcacagagtcttgaagccagagcagcgccaggatgtcacgggagctggccccactgctgcttctcctcctctccatccacagcgccctggccatgaggatctgctccttcaacgtcaggtcctttggggaaagcaagcaggaagacaagaatgccatggatgtcattgtgaaggtcatcaaacgctgtgacatcatactcgtgatggaaatcaaggacagcaacaacaggatctgccccatactgatggagaagctgaacagaaattcaaggagaggcataacgtacaactatgtgattagctctcggcttggaagaaacacatataaagaacaatatgcctttctctacaaggaaaagctggtgtctgtgaagaggagttatcactaccatgactatcaggatggagacgcagatgtgttttccagggagccctttgtggtctggttccaatctccccacactgctgtcaaagacttcgtgattatccccctgcacaccaccccagagacatccgttaaggagatcgatgagttggttgaggtctacacggacgtgaaacaccgctggaaggcggagaatttcattttcatgggtgacttcaatgccggctgcagctacgtccccaagaaggcctggaagaacatccgcttgaggactgaccccaggtttgtttggctgatcggggaccaagaggacaccacggtgaagaagagcaccaactgtgcatatgacaggattgtgcttagaggacaagaaatcgtcagttctgttgttcccaagtcaaacagtgtttttgacttccagaaagcttacaagctgactgaagaggaggccctggatgtcagcgaccactttccagttgaatttaaactacagtcttcaagggccttcaccaacagcaaaaaatctgtcactctaaggaagaaaacaaagagcaaacgctcctagacccaagggtctcatcttattaaccatttcttgcctctaaataaaatgtctctaacaaaaaaaaaaaaaaaaaaaaaaaaaaaaactcgag

SEQ ID NO: 156 - DNA, 1913 bp, Homo sapiens
  ref <308>: DATABASE ACCESSION NUMBER: NM_004981
gagaatttcaaccagaaagaacagccagtgcaaaggcccagagacaggaataaacttggccctgcgtcttcccaggtgaccacgccggcttcaggacatgcacggacacagccgcaacggccaggcccacgtgccccggcggaagcgccgcaaccgcttcgtcaagaagaacggccaatgcaacgtgtacttcgccaacctgagcaacaagtcgcagcgctacatggcggacatcttcaccacctgcgtggacacgcgctggcgctacatgctcatgatcttctccgcggccttccttgtctcctggctctttttcggcctcctcttctggtgtatcgccttcttccacggtgacctggaggccagcccaggggtgcctgcggcggggggcccggcggcgggtggtggcggagcagccccggtggcccccaagccctgcatcatgcacgtgaacggcttcctgggtgccttcctgttctcggtggagacgcagacgaccatcggctatgggttccggtgcgtgacagaggagtgcccgctggcagtcatcgctgtggtggtccagtccatcgtgggctgcgtcatcgactccttcatgattggcaccatcatggccaagatggcgcggcccaagaagcgggcgcagacgttgctgttcagccaccacgcggtcatttcggtgcgcgacggcaagctctgcctcatgtggcgcgtgggcaacctgcgcaagagccacattgtggaggcccacgtgcgggcccagctcatcaagccctacatgacccaggagggcgagtacctgcccctggaccagcgggacctcaacgtgggctatgacatcggcctggaccgcatcttcctggtgtcgcccatcatcattgtccacgagatcgacgaggacagcccgctttatggcatgggcaaggaggagctggagtcggaggactttgagatcgtggtcatcctggagggcatggtggaggccacggccatgaccacccaggcccgcagctcctacctggccagcgagatcctgtggggccaccgctttgagcctgtggtcttcgaggagaagagccactacaaggtggactactcacgttttcacaagacctacgaggtggccggcacgccctgctgctcggcccgggagctgcaggagagtaagatcaccgtgctgcccgccccaccgccccctcccagtgccttctgctacgagaacgagctggcccttatgagccaggaggaagaggagatggaggaggaggcagctgcggcggccgcggtggccgcaggcctgggcctggaggcgggttccaaggaggaggcgggcatcatccggatgctggagttcggcagccacctggacctggagcgcatgcaggcttccctcccgctggacaacatctcctaccgcagggagtctgccatctgacctccaggcccggccctcaccactgcccacaagagcctctgccgggggtgggatgccaggacaccccctcccacactcaggacagagccaaccctggctccgtggaccttctggaggaaggtgggggtttcaaagactgggggaccccttcctcctgactccagcacccaggcctgggaagagctcggccccgatcagcctgagttccgccagcgcctacttctggtggctctaggtccccggatccaccacccttcccccactgactcttcaaggacgtgccctctttgctctcagaaccttggggaaggtggctggactgctgggcgggggacatctcggggtttcagggtgggcagggggttagtttggggaggggggggtgcgtttcttttgcatgactgtggcctgttgctcatgactttcttttgtaaatatctataaatggagacagatggagacaccaaaaaaaaaaaaa

SEQ ID NO: 157 - DNA, 746 bp, Homo sapiens
  ref <308>: DATABASE ACCESSION NUMBER: NM_005176
ctctctgtcttctctgcagtgggagcagctctcctgccacagctcctcaccccctgaaaatgttcgcctgctccaagtttgtctccactccctccttggtcaagagcacctcacagctgctgagccgtccgctatctgcagtggtgctgaaacgaccggagatactgacagatgagagcctcagcagcttggcagtctcatgtccccttacctcacttgtctctagccgcagcttccaaaccagcgccatttcaagggacatcgacacagcagccaagttcattggagctggggctgccacagttggggtggctggttctggggctgggattggaactgtgtttgggagcctcatcattggttatgccaggaacccttctctgaagcaacagctcttctcctacgccattctgggctttgccctctcggaggccatggggctcttttgtctgatggtagcctttctcatcctctttgccatgtgaaggagccgtctccacctcccatagttctcccgcgtctggttggccccgtgtgttccttttcctatacctccccaggcagcctggggaacgtggttggctcagggtttgacagagaaaagacaaataaatactgtattaataagatgtttcttgagtctcctgtgtatatttcttttccacagttggctgagtgccttcgtgagagtacaaggcccgaagggtagtgatggtgctaaactcaacatggatttggctgagctc

SEQ ID NO: 158 - DNA, 836 bp, Homo sapiens
  ref <308>: DATABASE ACCESSION NUMBER: NM_005192
ccggtgagtcgccggcgctgcagagggaggcggcactggtctcgacgtggggcggccagcgatgaagccgcccagttcaatacaaacaagtgagtttgactcatcagatgaagagcctattgaagatgaacagactccaattcatatatcatggctatctttgtcacgagtgaattgttctcagtttctcggtttatgtgctcttccaggttgtaaatttaaagatgttagaagaaatgtccaaaaagatacagaagaactaaagagctgtggtatacaagacatatttgttttctgcaccagaggggaactgtcaaaatatagagtcccaaaccttctggatctctaccagcaatgtggaattatcacccatcatcatccaatcgcagatggagggactcctgacatagccagctgctgtgaaataatggaagagcttacaacctgccttaaaaattaccgaaaaaccttaatacactgctatggaggacttgggagatcttgtcttgtagctgcttgtctcctactatacctgtctgacacaatatcaccagagcaagccatagacagcctgcgagacctaagaggatccggggcaatacagaccatcaagcaatacaattatcttcatgagtttcgggacaaattagctgcacatctatcatcaagagattcacaatcaagatctgtatcaagataaaggaattcaaatagcatatatatgaccatgtctgaaatgtcagttctctagcataatttgtattgaaatgaaaccaccagtgttatcaacttgaatgtaaatgtacatgtgcagatattcctaaagttttattgac

SEQ ID NO: 159 - DNA, 3243 bp, Homo sapiens
  ref <308>: DATABASE ACCESSION NUMBER: NM_005231
agtagagcctggtgcctgggagcggctggcgcggcggaatccagggccgacccgggccggaccgaccccaggcggcgacggaatcagtccccaatgcctggaaattcctcattggattactgtgttttaaacagaatttcgtgaacagccttttatctccaagcggaaagaaagatgtggaaagcttcagcaggccacgctgtgtccatcgcccaggatgacgcgggggccgatgactgggagaccgaccctgattttgtgaatgatgtgagtgagaaggagcaaagatggggtgccaagacggtgcagggctccgggcaccaggagcatatcaacatacacaagctgagggagaatgtctttcaagagcatcagacccttaaggagaaggaacttgaaacaggaccaaaagcttcccatggctatggagggaaatttggtgtggaacaagaccgaatggataagtcagctgtcggccacgaatatcagtcgaaactttccaagcactgctcgcaggtggactcggtccgtggcttcggaggcaagtttggtgtccagatggacagagttgatcagtctgctgtaggctttgaataccaggggaagactgagaagcatgcctcccagaaagactactccagtggttttggcggcaagtatggcgtgcaggccgaccgagtagacaagagcgcggtgggcttcgactaccagggcaagacggagaagcacgagtcacagagagattactccaaaggtttcggcggcaaatacggtatcgacaaggacaaagtggataagagcgccgttggctttgagtatcaaggcaaaacggagaagcacgagtcccagaaagactatgtgaaagggtttggaggaaaatttggtgtgcagacagacagacaagacaaatgtgcccttggctgggatcaccaggagaaattgcagctgcatgaatcccaaaaagattataagactggttttggaggcaaattcggtgttcagtcggagaggcaggactccgctgctgtggggtttgattacaaggagaagctggccaagcacgagtcccagcaagactactccaaaggattcggcgggaagtatggggtgcagaaggatcggatggataagaatgcgtcaacctttgaggatgtcacccaggtgtcctctgcctaccagaagacagtacctgtcgaagctgtgaccagcaaaacaagtaacatcagagctaactttgaaaacctcgctaaggagaaagagcaggaggacaggcggaaggcggaggcggagagagcccagcggatggccaaggagcggcaggagcaggaagaggccaggaggaagctggaggagcaagccagagccaaaacgcaaacgccccctgtgtcgcccgcacctcagccaaccgaggagaggctgccctcgagccccgtctatgaggatgcggcttccttcaaggcagagctgagctacagaggccctgtgagtgggacggagccggagcccgtgtacagcatggaggccgctgactaccgagaggccagcagccagcagggcctggcctatgccacagaggctgtctatgaaagcgcagaggccccgggccactatcccgcagaggacagcacctacgatgagtacgagaacgatctggggatcacagccgtcgccctgtacgactaccaggctgcgggcgatgatgagatctcatttgaccctgatgacatcatcaccaacatcgagatgattgacgacggctggtggcgcggggtgtgcaagggccggtacgggctcttcccagccaactatgtggagctgcggcagtagggcccccagcccccccccggagctgcgccctggatcctcacactacagatcaggccttctttggttcttgggtggttttgggttttttctgttttttttttttttttttttttttgaaggtggggaggggaatatacacattgcttttatatttaatacttttgctgatgcttttgaaaatgtttatgccacagaatttgctaatatattgtaatcacattccttaggaggactttggtaattggttttatgcattgatggttttttttttcttttttgccaaattgactgtcacgcggcagcttcagggagctcgcattctcttgtgttcgtgttgccctcgtgcccatcaagtgcagtcgggacctcccaggacaagcacgaggcctcaggtcggccctgtggcgggtaggcaggaaggactgtcccagacgaggggcttcctctagagtctcactgctggggaggagaggactgggcctgatggaagttaacccggagctaagtcacccagagcacaggagctgccatgtcagatgggaaatctgcctatgtcataccgtgacagcccgcaggatcaggtgacttctagcagagaccctggtttttttcctgtgcccactccggcttgtcctcatctctacccatcccctgatgcccaggtcaccgggagggctgctgggagcctctcctgtccccgccgggcagtgtcactgagtccttgaaatcctcccctgccccgcgggtctctggattgggacgcacagtgcagttgaggtctgcgtcgggcttggcttttcacaaaggctgatgtcttaactgtcacccatatggtccctgggccaccgggcagcctggggcggtgtgtgtgccatgtcacagcatggcctctcggccttgggaaggaaggcagtgcctgctctgctgtgagccgccaggaaccctcctcctgtcaatgggggtgtagtatttttgccaaaatatcatgttcaatttcagtagtttgatcagttgaaggctagaagtgtgaagtgcagatgagtgtgtgttcttccccaaggtccccccacagctccaggacaccgctgtcctggcatttgtggccactcactttgtaggaaactcatctccttcctgaggagccgggaggctggaccagtcccgtcgtgcagtcaggtgggcggtgtgtctttccagaaggtcacgtggaaatgtctcgggacttgggtcccggagtgcccgtgaagcgtgtttttgctcctgaggtgcattttctcatcatccttgctttaccacaatgagcaatgaggtcgggttttatatgcaacttattgtatctgaattcctgtagcacacctcataggtatgatttttttaaattaaagaattcagaataaacattttttgatccaaaaa

SEQ ID NO: 160 - DNA, 3600 bp, Homo sapiens
  ref <308>: DATABASE ACCESSION NUMBER: NM_005269
cccagactccagccctggaccgcgcatcccgagcccagcgcccagacagagtgtccccacaccctcctctgagacgccatgttcaactcgatgaccccaccaccaatcagtagctatggcgagccctgctgtctccggcccctccccagtcagggggcccccagtgtggggacagaaggactgtctggcccgcccttctgccaccaagctaacctcatgtccggcccccacagttatgggccagccagagagaccaacagctgcaccgagggcccactcttttcttctccccggagtgcagtcaagttgaccaagaagcgggcactgtccatctcacctctgtcggatgccagcctggacctgcagacggttatccgcacctcacccagctccctcgtagctttcatcaactcgcgatgcacatctccaggaggctcctacggtcatctctccattggcaccatgagcccatctctgggattcccagcccagatgaatcaccaaaaagggccctcgccttcctttggggtccagccttgtggtccccatgactctgcccggggtgggatgatcccacatcctcagtcccggggacccttcccaacttgccagctgaagtctgagctggacatgctggttggcaagtgccgggaggaacccttggaaggtgatatgtccagccccaactccacaggcatacaggatcccctgttggggatgctggatgggcgggaggacctcgagagagaggagaagcgtgagcctgaatctgtgtatgaaactgactgccgttgggatggctgcagccaggaatttgactcccaagagcagctggtgcaccacatcaacagcgagcacatccacggggagcggaaggagttcgtgtgccactgggggggctgctccagggagctgaggcccttcaaagcccagtacatgctggtggttcacatgcgcagacacactggcgagaagccacacaagtgcacgtttgaagggtgccggaagtcatactcacgcctcgaaaacctgaagacgcacctgcggtcacacacgggtgagaagccatacatgtgtgagcacgagggctgcagtaaagccttcagcaatgccagtgaccgagccaagcaccagaatcggacccattccaatgagaagccgtatgtatgtaagctccctggctgcaccaaacgctatacagatcctagctcgctgcgaaaacatgtcaagacagtgcatggtcctgacgcccatgtgaccaaacggcaccgtggggatggccccctgcctcgggcaccatccatttctacagtggagcccaagagggagcgggaaggaggtcccatcagggaggaaagcagactgactgtgccagagggtgccatgaagccacagccaagccctggggcccagtcatcctgcagcagtgaccactccccggcagggagtgcagccaatacagacagtggtgtggaaatgactggcaatgcagggggcagcactgaagacctctccagcttggacgagggaccttgcattgctggcactggtctgtccactcttcgccgccttgagaacctcaggctggaccagctacatcaactccggccaatagggacccggggtctcaaactgcccagcttgtcccacaccggtaccactgtgtcccgccgcgtgggccccccagtctctcttgaacgccgcagcagcagctccagcagcatcagctctgcctatactgtcagccgccgctcctccctggcctctcctttcccccctggctccccaccagagaatggagcatcctccctgcctggccttatgcctgcccagcactacctgcttcgggcaagatatgcttcagccagagggggtggtacttcgcccactgcagcatccagcctggatcggataggtggtcttcccatgcctccttggagaagccgagccgagtatccaggatacaaccccaatgcaggggtcacccggagggccagtgacccagcccaggctgctgaccgtcctgctccagctagagtccagaggttcaagagcctgggctgtgtccataccccacccactgtggcagggggaggacagaactttgatccttacctcccaacctctgtctactcaccacagccccccagcatcactgagaatgctgccatggatgctagagggctacaggaagagccagaagttgggacctccatggtgggcagtggtctgaacccctatatggacttcccacctactgatactctgggatatgggggacctgaaggggcagcagctgagccttatggagcgaggggtccaggctctctgcctcttgggcctggtccacccaccaactatggccccaacccctgtccccagcaggcctcatatcctgaccccacccaagaaacatggggtgagttcccttcccactctgggctgtacccaggccccaaggctctaggtggaacctacagccagtgtcctcgacttgaacattatggacaagtgcaagtcaagccagaacaggggtgcccagtggggtctgactccacaggactggcaccctgcctcaatgcccaccccagtgaggggcccccacatccacagcctctcttttcccattacccccagccctctcctccccaatatctccagtcaggcccctatacccagccaccccctgattatcttccttcagaacccaggccttgcctggactttgattcccccacccattccacagggcagctcaaggctcagcttgtgtgtaattatgttcaatctcaacaggagctactgtgggagggtgggggcagggaagatgcccccgcccaggaaccttcctaccagagtcccaagtttctggggggttcccaggttagcccaagccgtgctaaagctccagtgaacacatatggacctggctttggacccaacttgcccaatcacaagtcaggttcctatcccaccccttcaccatgccatgaaaattttgtagtgggggcaaatagggcttcacatagggcagcagcaccacctcgacttctgcccccattgcccacttgctatgggcctctcaaagtgggaggcacaaaccccagctgtggtcatcctgaggtgggcaggctaggagggggtcctgccttgtaccctcctcccgaaggacaggtatgtaaccccctggactctcttgatcttgacaacactcagctggactttgtggctattctggatgagccccaggggctgagtcctcctccttcccatgatcagcggggcagctctggacataccccacctccctctgggccccccaacatggctgtgggcaacatgagtgtcttactgagatccctacctggggaaacagaattcctcaactctagtgcctaaagagtagggaatctcatccatcacagatcgcatttcctaaggggtttctatccttccagaaaaattgggggagctgcagtcccctgcacaagatgccccagggatgggaggtatgggctgggggctatgtatagtctgtatacgttttgaggagaaatttgataatgacactgtttcctgataataaaggaactgcatcag

SEQ ID NO: 161 - DNA, 1574 bp, Homo sapiens
  ref <308>: DATABASE ACCESSION NUMBER: NM_005447
aattcggcacgaggaaagcttccagccctcctcccttcaccctggaaatccagacacccccacccccaccctcagatcactttaagataatttctttattcgtttgcccgacagaccatggctccctttggaagaaacttgctaaagactcggcataaaaacagatctccaactaaagacatggattcagaagagaaggaaattgtggtttgggtttgccaagaagagaagtttgtctgtgggctgactaaacgcaccacctctgctgatgtcatccaggctttgcttgaggaacatgaggctacgtttggagagaaacgatttcttctggggaagcccagtgattactgcatcatagagaagtggagaggctccgaaagggttcttcctccactaactagaatcctgaagctttggaaagcgtggggagatgagcagcccaatatgcaatttgttttggttaaagcagatgcttttcttccagttcctttgtggcggacagctgaagccaaattagtgcaaaacacagaaaaattgtgggagctcagcccagcaaactacatgaagactttaccaccagataaacaaaaaagaatagtcaggaaaactttccggaaactggctaaaattaagcaggacacagtttctcatgatcgagataatatggagacattagttcatctgatcatttcccaggaccatactattcatcagcaagtcaagagaatgaaagagctggatctggaaattgaaaagtgtgaagctaagttccatcttgatcgagtagaaaatgatggagaaaactatgttcaggatgcatatttaatgcccagtttcagtgaagttgagcaaaatctagacttgcagtatgaggaaaaccagactctggaggacctgagcgaaagtgatggaattgaacagctggaagaacgactgaaatattaccgaatactcattgataagctctctgctgaaatagaaaaagaggtaaaaagtgtttgcattgatataaatgaagatgcggaaggggaagctgcaagtgaactggaaagctctaatttagagagtgttaagtgtgatttggagaaaagcatgaaagctggtttgaaaattcactctcatttgagtggcatccagaaagagattaaatacagtgactcattgcttcagatgaaagcaaaagaatatgaactcctggccaaggaattcaattcacttcacattagcaacaaagatgggtgccagttaaaggaaaacagagcgaaggaatctgaggttcccagtagcaatggggagattcctccctttactcaaagagtatttagcaattacacaaatgacacagactcggacactggtatcagttctaaccacagtcaggactccgaaacaacagtaggagatgtggtgctgttgtcaacatagttccaatggctcctttctgacctgctttcatgttttaatgtttgtttaatttaataggaaacctcattttaaatataacactcaaaaaaatgtaaatcatattgtagtattcaatagttaataaaaactcgagaaatgtgttgtttctg

SEQ ID NO: 162 - DNA, 2978 bp, Homo sapiens
  ref <308>: DATABASE ACCESSION NUMBER: NM_005542
gggccccgcggcccgccatataaacccgcgcgcccgccaggcgctgcggccgtcccgggccgtgactcctcctttcccccgccccgcctccgttcggagagccggcgggcgggcgcctctcggccaggaagcgcctcttggacgcgtgtgaccgatgcccagattgcacgaccacttctggagctgctcctgtgcgcacagcgcgaggcgccgaggccccccgcgagccagcgccgcggggctggcggccaaggttggggagatgatcaacgtttccgtgtccgggccctccctgctggcggcccacggtgccccggacgctgaccccgcgcccaggggccgcagtgctgcgatgagcggccccgagcccggcagcccctaccccaacacctggcatcatcgcctgttgcagaggagcctcgtgctcttctcggttggggtggtcctagccctggtgctcaacctgctgcagatccagaggaatgtcactctcttccccgaggaggtgatcgccaccatcttttcctccgcctggtgggtccctccctgctgcgggacagcagctgctgttgttggcctactgtacccctgtatcgacagtcacctcggagaaccccacaaatttaagagagaatgggccagtgtcatgcgctgcatagcagtttttgttggcattaaccacgccagtgctaaattggattttgccaataatgtccagctgtccttgactttagcagccctatctttgggcctttggtggacatttgatcgttccagaagtggccttgggctggggatcaccatagcttttctagctacgctgatcacgcagtttctcgtgtataatggtgtctatcagtatacatccccagatttcctctatattcgttcttggctcccttgtatatttttctcaggaggcgtcacggtggggaacataggacgacagttagctatgggtgttcctgaaaagccccatagtgattgagtcttcaaaaccaccgattctgagagcaaggaagattttggaagaaaatctgactgtggattatgacaaagattatcttttttcttaagtaatctatttagatcgggctgactgtacaaatgactcctggaaaaaactcttcacctagtctagaatagggaggtggagaatgatgacttaccctgaagtcttcccttgactgcccgcactggcgcctgtctgtgccctggagcattctgcccaggctacgtgggttcaggcaggtggcagcttcccaagtattcgatttcattcatgtgattaaaacaagttgccatatttcaaagccttgaactaagactcaattaccaacccgcagttttgtgtcagtgcccaaaggaggtaggttgatggtgcttaacaaacatgaagtatggtgtaataggaataatatttatccaaaagatttttaaaaatagggctgtgtttaaaaaaaaaaaacaaaacaagaaaagcagcagtgattatagagaggtcacactctaagtggggtcgcggcgtggccacgcttcacggtcacgctcgtccgtcctgcagtggcgtgtttacatggtcacacgtgtgtgtatcaccagtgggtcaactgcttgtcattcctcccgtggcagtttgtgtagacaatcttactgagcaaaaggcaatgaaaagtcttggttcccacactgcgatatattggaattttcacctcagtttatgaagtttatttcgaaatccatagtcatctaagaatgaatacctgtctgccatgtatttcaatcttagtgagccaaaattgtttgtttgttactacagaatagagatgactgttttttgccacagccctatggaatttgcaatctgtgattgccttgtaaaaaggagagtgcatatggcactgcattaaacgtgtggtgtttctagtcaatgatattggtgagcacaatgtattcatttaatggcatagaccataccagacctaatttgcaagtattgggtcttaaacttcaagtgcaatgtatatgaaaaccaatctgagccttgtatctcttaaatatttattttttttaacgtgtgagatgttcgagagaaggttctccattcatttcagtgctgcctggaggaaactcggcaatgatttctttcagttgtgaagttcctttcgtgttacaccctccactgaaccctcaaccttcgaaatactccagttttgtgggtttggtcatttttacttataaatttacctttttgtattttgcaatttacatgtgtttggtttgttttaaattctgtgaaagtggcttgattaaaagactccttttaaatggaagccaccagtcagcagaatggaagcttagaggaacttgcctgtgagcgctggtctttgtgtttggttttgtgatgtaacgatctttgctggggttttttgctttgttttgagggaaatgtcttggagtaaattttaagttcctggagttaatttgttttacaggaattttgttttttaaaaaaataggatcattctgaactttggaatgacccccttatatattttctgaaaatgaaaacagttacatgaaaaaaatttccaatgaagatgtcagcattttatgaaaaaccagaagttattagatgaaagcagcgagtgaatctttaaaacagacttgatcacgcacacacaataagtctttctctccgaaaccggaagtaaatctatatctgttagaaataatgtagccaaaagaatgtaaatttgaggatttttttgccaatagtttatagaaaatatatgaaccaaagtgatttgagtttgtaaaaatgtaaaatagtatgaacaaaatttgcactctaccagatttgaacatctagtgaggttcacattcatactaagttttcaacattgtgttctttttgcattcattttttacttttattaaaggttcaaaaccaaaaaaaaaaaaaaaaaaaaaaaaaa

SEQ ID NO: 163 - DNA, 2882 bp, Homo sapiens
  ref <308>: DATABASE ACCESSION NUMBER: NM_005573
gtgcagcctgagaggaaacaaagtgctgcgagcaggagacggcggcggcgcgaaccctgctgggcctccagtcaccctcgtcttgcattttcccgcgtgcgtgtgtgagtgggtgtgtgtgttttcttacaaagggtatttcgcgatcgatcgattgattcgtagttcccccccgcgcgcctttgccctttgtgctgtaatcgagctcccgccatcccaggtgcttctccgttcctctaaacgccagcgtctggacgtgagcgcaggtcgccggtttgtgccttcggtccccgcttcgccccctgccgtcccctccttatcacggtcccgctcgcggcctcgccgccccgctgtctccgccgcccgccatggcgactgcgacccccgtgccgccgcggatgggcagccgcgctggcggccccaccacgccgctgagccccacgcgcctgtcgcggctccaggagaaggaggagctgcgcgagctcaatgaccggctggcggtgtacatcgacaaggtgcgcagcctggagacggagaacagcgcgctgcagctgcaggtgacggagcgcgaggaggtgcgcggccgtgagctcaccggcctcaaggcgctctacgagaccgagctggccgacgcgcgacgcgcgctcgacgacacggcccgcgagcgcgccaagctgcagatcgagctgggcaagtgcaaggcggaacacgaccagctgctcctcaactatgctaagaaggaatctgatcttaatggcgcccagatcaagcttcgagaatatgaagcagcactgaattcgaaagatgcagctcttgctactgcacttggtgacaaaaaaagtttagagggagatttggaggatctgaaggatcagattgcccagttggaagcctccttagctgcagccaaaaaacagttagcagatgaaactttacttaaagtagatttggagaatcgttgtcagagccttactgaggacttggagtttcgcaaaagcatgtatgaagaggagattaacgagaccagaaggaagcatgaaacgcgcttggtagaggtggattctgggcgtcaaattgagtatgagtacaagctggcgcaagcccttcatgagatgagagagcaacatgatgcccaagtgaggctgtataaggaggagctggagcagacttaccatgccaaacttgagaatgccagactgtcatcagagatgaatacttctactgtcaacagtgccagggaagaactgatggaaagccgcatgagaattgagagcctttcatcccagctttctaatctacagaaagagtctagagcatgtttggaaaggattcaagaattagaggacttgcttgctaaagaaaaagacaactctcgtcgcatgctgacagacaaagagagagagatggcggaaataagggatcaaatgcagcaacagctgaatgactatgaacagcttcttgatgtaaagttagccctggacatggaaatcagtgcttacaggaaactcttagaaggcgaagaagagaggttgaagctgtctccaagcccttcttcccgtgtgacagtatcccgagcatcctcaagtcgtagtgtacgtacaactagaggaaagcggaagagggttgatgtggaagaatcagaggcgagtagtagtgttagcatctctcattccgcctcagccactggaaatgtttgcatcgaagaaattgatgttgatgggaaatttatccgcttgaagaacacttctgaacaggatcaaccaatgggaggctgggagatgatcagaaaaattggagacacatcagtcagttataaatatacctcaagatatgtgctgaaggcaggccagactgttacaatttgggctgcaaacgctggtgtcacagccagccccccaactgacctcatctggaagaaccagaactcgtggggcactggcgaagatgtgaaggttatattgaaaaattctcagggagaggaggttgctcaaagaagtacagtctttaaaacaaccatacctgaagaagaggaggaggaggaagaagcagctggagtggttgttgaggaagaacttttccaccagcagggaaccccaagagcatccaatagaagctgtgcaattatgtaaaattttcaactgtcttcctcaaaataaagaagtatggtaatccttacctgtatacagtgcagagccttctcagaagcacagaatatttttatatttcctttatgtgaatttttaagctgcaaatctgatggccttaatttcctttttgacactgaaagttttgtaaaagaaatcatgtccatacactttgttgcaagatgtgaattattgacactgaacttaataactgtgtactgttcggaaggggttcctcaaattttttgactttttttgtatgtgtgttttttctttttttttaagttcttatgaggaggggagggtaaataaaccactgtgcgtcttggtgtaatttgaagattgccccatctagactagcaatctcttcattattctctgctatatataaaacggtgctgtgagggaggggaaaagcatttttcaatatattgaacttttgtactgaatttttttgtaataagcaatcaaggttataattttttttaaaatagaaattttgtaagaaggcaatattaacctaatcaccatgtaagcactctggatgatggattccacaaaacttggttttatggttacttcttctcttagattcttaattcatgaggagggtgggggagggaggtggagggagggaagggtttctctattaaaatgcattcgttgtgttttttaagatagtgtaacttgcttaaatttcttatgtgacattaacaaataaaaaagctcttttaatat

SEQ ID NO: 164 - DNA, 2728 bp, Homo sapiens
  ref <308>: DATABASE ACCESSION NUMBER: NM_005721
atcttggcttcccggggaaaggcggcgtgaggggaagaagttgtagggtgggggcaggagtgaggaggagggaagagagagggggaggaggccgcggcggggcagggcggggactgcctgcctgcctgggttgcggaagtgatagccgccgaccgagcctgctgctttcttgctactgcttcggcttcccggctaccccccggacggtgaaggcggcccagctgtggatggtcagatagcccttgtctcccgccgccaatctctggcccctagcagcacggagcagacggcggcagcagcagcagcaggcgaggaggaagatggcgggacggctgccggcctgtgtggtggactgtggcacggggtatacaaaactaggatatgctggaaatacagaaccacagtttatcatcccttcctgtattgctattaaggagtcagcaaaagtgggtgatcaagctcaaaggagggtgatgaaaggtgttgatgacctagacttcttcattggtgatgaagcaatagaaaaacctacatatgcaacaaagtggccaatccgccatggtatagttgaagattgggacttaatggaaaggtttatggagcaagtgatctttaaatatttaagggcagaacctgaagaccattattttcttttgactgaacctccattgaatactccagaaaacagggaatatactgctgaaataatgtttgagtccttcaatgttccaggcttgtacattgctgtgcaggctgttcttgccttagctgcatcttggacctcaagacaagtaggagaacggacgttgaccggtacggtaatagacagtggagatggtgtcactcatgtcattcctgtggctgaagggtatgtgattggcagctgtattaaacacattccaatcgcaggacgagatataacatattttattcagcaactgctgagagaccgagaagtaggaatccctccagaacaatccttggaaactgctaaggcagtaaaggagcgctatagttatgtctgcccagatttagtaaaagaatttaacaagtatgatacagatgggtcaaaatggattaaacagtatactggaatcaatgctatctcaaagaaagagttttctatcgatgttggttatgagagatttttgggacctgaaatcttttttcatccagagtttgctaatccagactttacacaacctatctcagaagttgtagatgaagtaattcagaattgtcctattgatgtcagacgtcctctctacaagaatattgtcctctctggaggttcaaccatgttcagggactttggacgtcgcttgcaaagagatttgaaaagaactgtagatgcccggctgaaattaagtgaggaattgagtggtggtagattgaagccaaaacctattgatgtacaagtcattacacaccacatgcagcgatatgcagtttggtttggaggatcaatgctggcttccacgcctgagttctaccaagtatgccacaccaaaaaggattatgaagaaattggacctagcatttgtcgtcacaatccagtgtttggagtcatgtcgtaaaattggcttcatagttattggggttagggaggtggggaagagataatctttctgattacctgttttgtctggatggctggttttgaggttttaaacctgacttgaaatagtaacaccaaacatgattatacaggaatattttaataagtgtatcaccatgcagatgtagaagagagcgaaagtgattgtgtttttctttagattgaatatttgaatcttatgtgtaacaaaaagaagtgggttttagttctttctgtgccctgatattttgtatattaatgaattatccaagattcgatgggatttatcagtgtgtagatagctctataatgcttgaattgtacacttctaagtgtgcagtgcaagagcttgtttatatttcatactttttatactttgaggaaaaaaagtcaaagaaaaattgtatttgagggaaaaaaccatgaccaagtaaaggataaattcaaaaaatagcctcatgagacttggcatacacactcgtgggattccagttattatggagtgcttccatccctctccaccccttccccccaaaaggttttctttgcaagtgcttttggaactaagagctagtatcttggattaactgatgcctgctagtgctttctgattactcgcattctgtttcttgctttaaaagaagagtaaagacaagagtgttggaccagtattgcagttctgtagtgtcatttcttataaaaaacaaaacaacaacaataatttatcaaaattggcatatttaaagcctaacattctaataaaggcacaaatttctttttaatacttgtttcagcctctttaatctctttataagttaactaataaatctattttcttcagacttctgcaatagttctttaaaatcacaacagttagcaagctgacttttgtaatgtgctcaatacaaatacttgtgaacttttaatatgttgagtgctttcattttgataactggatctccatttgatattttcatttgtataactcatttgcagtctgaaaattttttttagtgccagtccctgaacatatcattgaaagttaattttctttgcattttaaaatatctggattatgaagaaaaagtgatgaaaataaattaaaactgaattacaaaaaaaaaaaaaaaa

SEQ ID NO: 165 - DNA, 2972 bp, Homo sapiens
  ref <308>: DATABASE ACCESSION NUMBER: NM_005733
tcttcggacctaggctgccctgccgtcatgtcgcaagggatcctttctccgccagcgggcttgctgtccgatgacgatgtcgtagtttctcccatgtttgagtccacagctgcagatttggggtctgtggtacgcaagaacctgctatcagactgctctgtcgtctctacctccctagaggacaagcagcaggttccatctgaggacagtatggagaaggtgaaagtatacttgagggttaggcccttgttaccttcagagttggaacgacaggaagatcagggttgtgtccgtattgagaatgtggagacccttgttctacaagcacccaaggactcgtttgccctgaagagcaatgaacggggaattggccaagccacacacaggttcaccttttcccagatctttgggccagaagtgggacaggcatccttcttcaacctaactgtgaaggagatggtaaaggatgtactcaaagggcagaactggctcatctatacatatggagtcactaactcagggaaaacccacacgattcaaggtaccatcaaggatggagggattctcccccggtccctggcgctgatcttcaatagcctccaaggccaacttcatccaacacctgatctgaagcccttgctctccaatgaggtaatctggctagacagcaagcagatccgacaggaggaaatgaagaagctgtccctgctaaatggaggcctccaagaggaggagctgtccacttccttgaagaggagtgtctacatcgaaagtcggataggtaccagcaccagcttcgacagtggcattgctgggctctcttctatcagtcagtgtaccagcagtagccagctggatgaaacaagtcatcgatgggcacagccagacactgccccactacctgtcccggcaaacattcgcttctccatctggatctcattctttgagatctacaacgaactgctttatgacctattagaaccgcctagccaacagcgcaagaggcagactttgcggctatgcgaggatcaaaatggcaatccctatgtgaaagatctcaactggattcatgtgcaagatgctgaggaggcctggaagctcctaaaagtgggtcgtaagaaccagagctttgccagcacccacctcaaccagaactccagccgcagtcacagcatcttctcaatcaggatcctacaccttcagggggaaggagatatagtccccaagatcagcgagctgtcactctgtgatctggctggctcagagcgctgcaaagatcagaagagtggtgaacggttgaaggaagcaggaaacattaacacctctctacacaccctgggccgctgtattgctgcccttcgtcaaaaccagcagaaccggtcaaagcagaacctggttcccttccgtgacagcaagttgactcgagtgttccaaggtttcttcacaggccgaggccgttcctgcatgattgtcaatgtgaatccctgtgcatctacctatgatgaaactcttcatgtggccaagttctcagccattgctagccagcttgtgcatgccccacctatgcaactgggattcccatccctgcactcgttcatcaaggaacatagtcttcaggtatcccccagcttagagaaaggggctaaggcagacacaggccttgatgatgatattgaaaatgaagctgacatctccatgtatggcaaagaggagctcctacaagttgtggaagccatgaagacactgcttttgaaggaacgacaggaaaagctacagctggagatgcatctccgagatgaaatttgcaatgagatggtagaacagatgcaacagcgggaacagtggtgcagtgaacatttggacacccaaaaggaactattggaggaaatgtatgaagaaaaactaaatatcctcaaggagtcactgacaagtttttaccaagaagagattcaggagcgggatgaaaagattgaagagctagaagctctcttgcaggaagccagacaacagtcagtggcccatcagcaatcagggtctgaattggccctacggcggtcacaaaggttggcagcttctgcctccacccagcagcttcaggaggttaaagctaaattacagcagtgcaaagcagagctaaactctaccactgaagagttgcataagtatcagaaaatgttagaaccaccaccctcagccaagcccttcaccattgatgtggacaagaagttagaagagggccagaagaatataaggctgttgcggacagagcttcagaaacttggtgagtctctccaatcagcagagagagcttgttgccacagcactggggcaggaaaacttcgtcaagccttgaccacttgtgatgacatcttaatcaaacaggaccagactctggctgaactgcagaacaacatggtgctagtgaaactggaccttcggaagaaggcagcatgtattgctgagcagtatcatactgtgttgaaactccaaggccaggtttctgccaaaaagcgccttggtaccaaccaggaaaatcagcaaccaaaccaacaaccaccagggaagaaaccattccttcgaaatttacttccccgaacaccaacctgccaaagctcaacagactgcagcccttatgcccggatcctacgctcacggcgttcccctttactcaaatctgggccttttggcaaaaagtactaaggctgtggggaaagagaagagcagtcatggccctgaggtgggtcagctactctcctgaagaaataggtctcttttatgctttaccatatatcaggaattatatccaggatgcaatactcagacactagcttttttctcacttttgtattataaccacctatgtaatctcatgttgttgtttttttttatttacttatatgatttctatgcacacaaaaacagttatattaaagatattattgttcacattttttattgaaaaaaaaaaaaaa

SEQ ID NO: 166 - DNA, 1099 bp, Homo sapiens
  ref <308>: DATABASE ACCESSION NUMBER: NM_005792
cggccggagtgcggcgctgggcggaagctaccatggcggccgagagaaagacaaagttgtccaagaatctgctgcgcatgaagtttatgcaaaggggactggactcagaaaccaagaaacaactagaagaagaagaaaagaaaatcattagtgaagagcactggtacttggatttgccagagcttaaagagaaagagagtttcataatagaagagcagagtttcttactatgtgaagatcttctctatggaagaatgtcattcagaggatttaatcctgaggttgagaaattgatgcttcagatgaatgctaagcacaaagcagaagaagttgaagatgaaacagtagagcttgatgtgtcagatgaagagatggctagaagatatgagaccttggtggggacaattgggaaaaagtttgccagaaagagagaccatgccaattatgaagaagatgaaaatggagacatcacaccaattaaagcaaagaagatgttcttaaagccccaggattaagatggatgccttaagcgatggcccaggggtgcttggtggaagtcagcagggcatctggagctcatcccaatggtgtctctatagttattaatactgtaacgtttacttgtaaagagattatcattttagaaacatgctgtttttgaaacagatgtgtgatggatgttgtacatcctttgcttcttggtattcattcagagtggatttttagcccctgatctacaaatgtacattgttacagggctgcttcctaaagattttttttacctcaggtttctcttaatatagttctccagtcactgaccttgaattgacttacataaactactgccaatgtttaaattgcccttatgtttatgtttattatgtcaagccaattcgtacatacaatttggaatcaagtgtcataagaatttattatataaatttatcaagaataaaaatgcctctccagccttaagtatttacatgctcccaggtcattgtcagtttatggtattatgttgttttatttaaagcattgaattgatagaaaaatttgctctgtaataaaaatctactttcaaaaaaaaaaaaaaaaaaaa

SEQ ID NO: 167 - DNA, 1312 bp, Homo sapiens
  ref <308>: DATABASE ACCESSION NUMBER: NM_005856
gagcgtgacccagctgcggccggccagccatggagactggagcgctgcggcgcccgcaacttctcccgttgctgctgctgctctgcggtgggtgtcccagagcaggcggctgcaacgagacaggcatgttggagaggctgcccctgtgtgggaaggctttcgcagacatgatgggcaaggtggacgtctggaagtggtgcaacctgtccgagttcatcgtgtactatgagagtttcaccaactgcaccgagatggaggccaatgtcgtgggctgctactggcccaaccccctggcccagggcttcatcaccggcatccacaggcagttcttctccaactgcaccgtggacagggtccacttggaggaccccccagacgaggttctcatcccgctgatcgttatacccgtcgttctgactgtcgccatggctggcctggtggtgtggcgcagcaaacgcaccgacacgctgctgtgagggtcccggtgagatggagtgggtcacacctggcaagctggaagaaagttccctggggatgggagatcgggtgggtgctgccaatctccagctactgtggccacaccccacctggtcatgggcagacccctcccttcctgggctgacctgctccctcgaggccagcctgctccctggctgaggctcaggctatccgcccaagctctttgctcattctagggccagtggaggaaaatgtgataaggccagagcttgtgtgctgggcaagaaatcacctgctgcatcctgtgctccgcaggctgggccggaagcctctgcctgcaggtttctatgctgtttcttagcacagaatccagcctagccttagccgcagtctaggccctgcttggactaggactccttgcttgaccccatctctggttcctgccctggctcctgcaccagccccagctcctgcctacatccaggcagaaatataggcaggggctcttggaagacgttccgtgctgtgacctccgagccctcctggtgggaagacagctggaaaggctgggaggagaagggaggggctgggggttcccaggagccatgcgtggcctgcagagtccattccatcatgatgctgtgcccgctatgggctgtgtccatgaccagaggctggagtgggggtgtgttatagcccctcaccgggacttgctgtgcggatggggcctgggcctccttcctacaggggctcctctgtgggtgaggggccctctggaatggcatcccatgagcttgtggcctctatctgctaccatctgtgttttatctgagtaaagttaccttacttctgg

SEQ ID NO: 168 - DNA, 3769 bp, Homo sapiens
  ref <308>: DATABASE ACCESSION NUMBER: NM_005915
aaagctgcagcgtctggaaaaaagcgacttgtggcggtcgagcgtggcgcaggcgaatcctcggcactaagcaaatatggacctcgcggcggcagcggagccgggcgccggcagccagcacctggaggtccgcgacgaggtggccgagaagtgccagaaactgttcctggacttcttggaggagtttcagagcagcgatggagaaattaaatacttgcaattagcagaggaactgattcgtcctgagagaaacacattggttgtgagttttgtggacctggaacaatttaaccagcaactttccaccaccattcaagaggagttctatagagtttacccttacctgtgtcgggccttgaaaacattcgtcaaagaccgtaaagagatccctcttgccaaggatttttatgttgcattccaagacctgcctaccagacacaagattcgagagctcacctcatccagaattggtttgctcactcgcatcagtgggcaggtggtgcggactcacccagttcacccagagcttgtgagcggaacttttctgtgcttggactgtcagacagtgatcagggatgtagaacagcagttcaaatacacacagccaaacatctgccgaaatccagtttgtgccaacaggaggagattcttactggatacaaataaatcaagatttgttgattttcaaaaggttcgtattcaagagacccaagctgagcttcctcgagggagtatcccccgcagtttagaagtaattttaagggctgaagctgtggaatcagctcaagctggtgacaagtgtgactttacagggacactgattgttgtgcctgacgtctccaagcttagcacaccaggagcacgtgcagaaactaattcccgtgtcagtggtgttgatggatatgagacagaaggcattcgaggactccgggcccttggtgttagggacctttcttataggctggtctttcttgcctgctgtgttgcgccaaccaacccaaggtttggggggaaagagctcagagatgaggaacagacagctgagagcattaagaaccaaatgactgtgaaagaatgggagaaagtgtttgagatgagtcaagataaaaatctataccacaatctttgtaccagcctgttccctactatacatggcaatgatgaagtaaaacggggtgtcctgctgatgctctttggtggcgttccaaagacaacaggagaagggacctctcttcgaggggacataaatgtttgcattgttggtgacccaagtacagctaagagccaatttctcaagcacgtggaggagttcagccccagagctgtctacaccagtggtaaagcgtccagtgctgctggcttaacagcagctgttgtgagagatgaagaatctcatgagtttgtcattgaggctggagctttgatgttggctgataatggtgtgtgttgtattgatgaatttgataagatggacgtgcgggatcaagttgctattcatgaagctatggaacagcagaccatatccatcactaaagcaggagtgaaggctactctgaacgcccggacgtccattttggcagcagcaaacccaatcagtggacactatgacagatcaaaatcattgaaacagaatataaatttgtcagctcccatcatgtcccgattcgatctcttctttatccttgtggatgaatgtaatgaggttacagattatgccattgccaggcgcatagtagatttgcattcaagaattgaggaatcaattgatcgtgtctattccctcgatgatatcagaagatatcttctctttgcaagacagtttaaacccaagatttccaaagagtcagaggacttcattgtggagcaatataaacatctccgccagagagatggttctggagtgaccaagtcttcatggaggattacagtgcgacagcttgagagcatgattcgtctctctgaagctatggctcggatgcactgctgtgatgaggtccaacctaaacatgtgaaggaagctttccggttactgaataaatcaatcatccgtgtggaaacacctgatgtcaatctagatcaagaggaagagatccagatggaggtagatgagggtgctggtggcatcaatggtcatgctgacagccctgctcctgtgaacgggatcaatggctacaatgaagacataaatcaagagtctgctcccaaagcctccttaaggctgggcttctctgagtactgccgaatctctaaccttattgtgcttcacctcagaaaggtggaagaagaagaggacgagtcagcattaaagaggagcgagcttgttaactggtacttgaaggaaatcgaatcagagatagactctgaagaagaacttataaataaaaaaagaatcatagagaaagttattcatcgactcacacactatgatcatgttctaattgagctcacccaggctggattgaaaggctccacagagggaagtgagagctatgaagaagatccctacttggtagttaaccctaactacttgctcgaagattgagatagtgaaagtaactgaccagagctgaggaactgtggcacagcacctcgtggcctggagcctggctggagctctgctagggacagaagtgtttctggaagtgatgcttccaggatttgttttcagaaacaagaattgagttgatggtcctatgtgtcacattcatcacaggtttcataccaacacaggcttcagcacttcctttggtgtgtttcctgtcccagtgaagttggaaccaaataatgtgtagtctctataaccaatacctttgttttcatgtgtaagaaaaggcccattacttttaaggtatgtgctgtcctattgagcaaataactttttttcaattgccagctactgcttttattcatcaaaataaaataacttgttctgaagttgtctattggatttctttctactgtaccctgattattacttccatctacttctgaatgtgagactttccctttttgcttaacctggagtgaagaggtagaactgtggtattatggatgaggtttctatgagaaggagtcattagagaactcatatgaaagctagaggccttagagatgactttccaaggttaattccagttgtttttttttttttttaagtttataaaagtttattatacttttttaaaattactctttagtaatttattttacttctgtgtcctaagggtaatttctcaggattgttttcaaattgcttttttaggggaaataggtcatttgctatattacaagcaatccccaaattttatggtcttccaggaaaagttattaccgtttatgatactaacagttcctgagacttagctatgatcagtatgttcatgaggtggagcagttcctgtgttgcagcttttaacaacagatggcattcattaaatcacaaagtatgttaaaggtcacaaaagcaaaataactgtctgaggctaaggcccacgtgggacagtctaatacccatgagtactcaacttgccttgatgtctgagctttccagtgcaatgtgaatttgagcagccagaaatctattagtagaaagcaagacagattaatataggttaaaacaatgatttaaatatgtttctcccaataattatctctttccctggaatcaacttgtatgaaaccttgtcaaaatgtactccacaagtatgtacaattaagtattttaaaaataaatggcaaacattaaaaacaaaaaaaaaaaaaaaaaaaa

SEQ ID NO: 169 - DNA, 3140 bp, Homo sapiens
  ref <308>: DATABASE ACCESSION NUMBER: NM_006027
cccgtgttctgcgttgccggccgtgggtgctctggccacagtgagttaggggcgtcggagcgggtttctccaaccgcaatcggctccgctcaaggggaggaggagagtcccttctcggaaggcctaaggaaacgtgtcgtctggaatgggcttgggggccacgcctgcacatctccgcgagacagagggataaagtgaagatggtgctgttattgttacctcgagtgccacatgcgacctctgagatatgtacacagtcattcttactatcgcactcagccattcttactacgctaaagaagaaataattattcgaggatatttgcctggcccagaagaaacttatgtaaatttcatgaactattatatccgttttcctcggagtgagagaaaactctttttagatatcatctgagaggtagttaatttggcaccatggggatacagggattgctacaatttatcaaagaagcttcagaacccatccatgtgaggaagtataaagggcaggtagtagctgtggatacatattgctggcttcacaaaggagctattgcttgtgctgaaaaactagccaaaggtgaacctactgataggtatgtaggattttgtatgaaatttgtaaatatgttactatctcatgggatcaagcctattctcgtatttgatggatgtactttaccttctaaaaaggaagtagagagatctagaagagaaagacgacaagccaatcttcttaagggaaagcaacttcttcgtgaggggaaagtctcggaagctcgagagtgtttcacccggtctatcaatatcacacatgccatggcccacaaagtaattaaagctgcccggtctcagggggtagattgcctcgtggctccctatgaagctgatgcgcagttggcctatcttaacaaagcgggaattgtgcaagccataattacagaggactcggatctcctagcttttggctgtaaaaaggtaattttaaagatggaccagtttggaaatggacttgaaattgatcaagctcggctaggaatgtgcagacagcttggggatgtattcacggaagagaagtttcgttacatgtgtattctttcaggttgtgactacctgtcatcactgcgtgggattggattagcaaaggcatgcaaagtcctaagactagccaataatccagatatagtaaaggttatcaagaaaattggacattatctcaagatgaatatcacggtaccagaggattacatcaacgggtttattcgggccaacaataccttcctctatcagctagtttttgatcccatcaaaaggaaacttattcctctgaacgcctatgaagatgatgttgatcctgaaacactaagctacgctgggcaatatgttgatgattccatagctcttcaaatagcacttggaaataaagatataaatacttttgaacagatcgatgactacaatccagacactgctatgcctgcccattcaagaagtcatagttgggatgacaaaacatgtcaaaagtcagctaatgttagcagcatttggcataggaattactctcccagaccagagtcgggtactgtttcagatgccccacaattgaaggaaaatccaagtactgtgggagtggaacgagtgattagtactaaagggttaaatctcccaaggaaatcatccattgtgaaaagaccaagaagtgcagagctgtcagaagatgacctgttgagtcagtattctctttcatttacgaagaagaccaagaaaaatagctctgaaggcaataaatcattgagcttttctgaagtgtttgtgcctgacctggtaaatggacctactaacaaaaagagtgtaagcactccacctaggacgagaaataaatttgcaacatttttacaaaggaaaaatgaagaaagtggtgcagttgtggttccagggaccagaagcaggtttttttgcagttcagattctactgactgtgtatcaaacaaagtgagcatccagcctctggatgaaactgctgtcacagataaagagaacaatctgcatgaatcagagtatggagaccaagaaggcaagagactggttgacacagatgtagcacgtaattcaagtgatgacattccgaataatcatattccaggtgatcatattccagacaaggcaacagtgtttacagatgaagagtcctactcttttgagagcagcaaatttacaaggaccatttcaccacccactttgggaacactaagaagttgttttagttggtctggaggtcttggagatttttcaagaacgccgagcccctctccaagcacagcattgcagcagttccgaagaaagagcgattcccccacctctttgcctgagaataatatgtctgatgtgtcgcagttaaagagcgaggagtccagtgacgatgagtctcatcccttacgagaaggggcatgttcttcacagtcccaggaaagtggagaattctcactgcagagttcaaatgcatcaaagctttctcagtgctctagtaaggactctgattcagaggaatctgattgcaatattaagttacttgacagtcaaagtgaccagacctccaagctatgtttatctcatttctcaaaaaaagacacacctctaaggaacaaggttcctgggctatataagtccagttctgcagactctctttctacaaccaagatcaaacctctaggacctgccagagccagtgggctgagcaagaagccggcaagcatccagaagagaaagcatcataatgccgagaacaagccggggttacagatcaaactcaatgagctctggaaaaactttggatttaaaaaagattctgaaaagcttcctccttgtaagaaacccctgtccccagtcagagataacatccaactaactccagaagcggaagaggatatatttaacaaacctgaatgtggccgtgttcaaagagcaatattccagtaaatgcagactgctgcaaagcttttgcctgcaagagaatctgatcaatttgaagtccctgtttgggaatgaggcacttatcagcatgaagaattttttctcattctgtgccattttaaaaatagaatacattttgtatattaactttaaaaaaaaaaaaaaaaaaa

SEQ ID NO: 170 - DNA, 1966 bp, Homo sapiens
  ref <308>: DATABASE ACCESSION NUMBER: NM_006070
gaggggcgaaaggacatttttttttttcttgctcccgcctctgttcttcccccacctgccacgtacagagcccaagttctcgctaggcttgttgggtcagcgcgattggccggggcccgcgcgagcctgcgagcgaggtgcggcggtcgcgaagggcaaccgagggggccgtgaccaccgcctccccgcgacgccccagtccagtggcctcgcgtccgcccattcagcggagacctgcggagaggcggcggccgcggcctccgcaagccgtctttctctagagttgtatatatagaacatcctggagtccaccatgaacggacagttggatctaagtgggaagctaatcatcaaagctcaacttggggaggatattcggcgaattcctattcataatgaagatattacttatgatgaattagtgctaatgatgcaacgagttttcagaggaaaacttctgagtaatgatgaagtaacaataaagtataaagatgaagatggagatcttataacaatttttgatagttctgacctttcctttgcaattcagtgcagtaggatactgaaactgacattatttgttaatggccagccaagaccccttgaatcaagtcaggtgaaatatctccgtcgagaactgatagaacttcgaaataaagtgaatcgtttattggatagcttggaaccacctggagaaccaggaccttccaccaatattcctgaaaatgatactgtggatggtagggaagaaaagtctgcttctgattcttctggaaaacagtctactcaggttatggcagcaagtatgtctgcttttgatcctttaaaaaaccaagatgaaatcaataaaaatgttatgtcagcgtttggcttaacagatgatcaggtttcagggccacccagtgctcctgcagaagatcgttcaggaacacccgacagcattgcttcctcctcctcagcagctcacccaccaggcgttcagccacagcagccaccatatacaggagctcagactcaagcaggtcagattgaaggtcagatgtaccaacagtaccagcaacaggccggctatggtgcacagcagccgcaggctccacctcagcagcctcaacagtatggtattcagtattcagcaagctatagtcagcagactggacctcaacaacctcagcagttccagggatatggccagcaaccaacttcccaggcaccagctcctgccttttctggtcagcctcaacaactgcctgctcagccgccacagcagtaccaggcgagcaattatcctgcacaaacttacactgcccaaacttctcagcctactaattatactgtggctcctgcctctcaacctggaatggctccaagccaacctggggcctatcaaccaagaccaggttttacttcacttcctggaagtaccatgacccctcctccaagtgggcctaatccttatgcgcgtaaccgtcctccctttggtcagggctatacccaacctggacctggttatcgataaggaggctcctctacaccaattaatgtagctgctagctattggcctcccaaaagactccagtactattttaatttgtattgaagaagttcagaaatttaaaagcagagcattttttatgatatcattgttggtgttaattgaaagtataatttgctggaacacaaagaccaaaatgaaagttttttcctccctgcttaaaaatgtagcagcttcttagttactttggaacactactcttacatgtataaagtgattgacttgactttctagcttcccttgtccggaggatattaaaatgctagggtgaggtttagccatcttacttggctttttactattaacatgatgtactaaagtagagccctttgagaatacaagatattatgtataaaatgtaacactgatgataggttaataaagatgattgaatccaaaaaaaaaaaaaaaaaa

SEQ ID NO: 171 - DNA, 4352 bp, Homo sapiens
  ref <308>: DATABASE ACCESSION NUMBER: NM_006141
gagggccctctttgtggctgcagttggcaagatggcgccggtgggggtggagaagaagctgctgctaggtcccaacgggcccgcggtggcggccgccggcgacctgaccagtgaggaggaggaaggccagagcctatggtcctccattctgagcgaagtgtccacccgcgccaggtccaagctgccgtccggcaagaacatcctggtcttcggtgaagatggttctggtaaaacaaccctcatgactaaactacaaggagctgagcatggcaaaaaaggaagaggcctagaatatctctacctcagtgtccatgatgaggaccgagatgatcacacgcgctgcaacgtgtggattctggatggagacttgtaccacaaaggcctgctgaaatttgcagtttctgctgaatccttgccagagaccctcgtcatttttgttgcagacatgtctagaccttggactgtgatggaatctctgcagaaatgggctagtgttttacgtgagcacattgataaaatgaaaattccaccagaaaaaatgagggagctggaacggaagtttgtgaaagattttcaagactatatggaacctgaagaaggttgtcaaggttccccacagagaagaggccctctgacctcaggctccgatgaagaaaatgttgccctgcctctgggtgacaatgtgctgactcataacctggggatcccggtgttggtggtgtgcacaaagtgtgatgcggtgagtgtcctggagaaggagcacgattacagggatgagcatttggactttatccagtcacacctgcggaggttctgccttcagtatggagctgccttgatttacacatcagtgaaagaagagaaaaacctcgacttgttgtataagtatattgttcataaaacatacggtttccacttcaccacacctgccttagttgtggaaaaggatgccgtttttatacctgcaggctgggacaatgaaaagaaaatagctattttacatgaaaattttacaaccgtgaagccggaagatgcatatgaagactttattgtgaaacctcccgtgagaaagctggtccacgacaaagagttggcagcagaagatgagcaggtgttcctaatgaagcaacagtcactccttgccaagcaaccagccactcccacgagagcttctgaatctcctgcaagaggaccctctggctctccaaggacccagggtcggggagggccagccagtgtgcctagctcctccccaggcacgtcagtaaaaaagccggacccaaacatcaaaaataatgcagcaagtgaaggggtgttggccagcttcttcaacagtctgttgagtaaaaagacaggctctcctggaagtcctggtgctggtggggtgcagagcacagccaagaagtcaggacaaaagactgtgttgtcaaatgttcaggaagaactggatagaatgactcgaaagccagactctatggtaacaaactcttcaacagaaaatgaagcctgaacctccttaaaaagtgcatatgtcgaatgaccaaataactatgtatattgatctgctaagaccaggatttttctgatatggcacatgctatcagttttttggggcaggggagatgaactttaaaaaaaaaaaaaaaacttcattggcttgtccgagtgtgaaatgcacatttaggaaggttacatgtcagaccctttgttaaggataacccttggactctggggcatgtggctcttttgtgggaggcaagcacatctgggcttcttgtggaggggaaggtagagtgaaagaaagagggcccactttctaacagggtggagcaaatgagaccaagaaatcattggtaagatgatggttagtctgaccagtttcatgttagtaaattcacttgttcttgggaagcagattaagtagcagaaagtccaggaaagaaagaccagaaggagtaatgagacaagtgatggtggggaagctgaatgttgagggaggtggaggaaggaggagatgagcagtgtcagtaaatactgtgcattcagtagaagttgaagaatcattgttagaagcatttccaaacaaaacactaagcaaaatgggaattaggcttattttgaatgcatctttaacttacgaaagatgtactaattgtgggggtgcctgagtcaggcggagctgacccaggggtgggaacgatggcagctgcccaggacccatgtgcttggcccaggctatgtcctcgtgagaggtactggggtccacggatatgtgttgtggggcagacagtcactgtgggatgtcttcaaagtcagcagttacagaattagtttactttgaattttgttgtctaaatagctcctgctttattttttaaattaaattttttgtttttactatcacaggctggcctaactaatacaaaataggtgatgaacctctggttttaccataatgcaatgtgccacggaaagtttgggggaggtttttaatgtaattgcactctggttaattggctcgtaccaagccctgccttatgacttgtggaaagcttcaaggagttccactgatgcaaaagggtcttttcctagcttcctggtctgatcagtgctatgagatggacagataagtgtgaatgttttatacagaaaatggaaatgatacatttctcttgttaggtgttttcataaaatgtagcattttttttcttatggaaataagagtttcaggtgtctccccacctagggcaaattcatgcacattgtcatgttataccaccattctggaaatgatttctgtggatttgaaattgcacttttaattttatatatgacagcatttaaatgcaaacactaccatgaatttaatgtataaaatgttgtcaaaccaagggaaaaaaccacagttcaccatgtggagtttactttttttatatgaatgtttgttgtactgtgtctaagcataacttccctaatgtcattacttttacataccagatttgactgaccactaatgtagtactggggataacttaatatcctatgttgtgtcaagactctttgaagactttcttgaattgctttcgtaaaggtctgaacactgttaaggagaaagctgagtatcaacttgcctttctgatagaaatgtttcttgtgccagttttattgttgagatatactatttttttccttttttaattcagttttttaaaaaaacaaatgtattgtggcttccagttaccaggttgtctaggtaatgacagtaaactgactgtagaatgataattgtggtatagtgaccaatagatgccaaacagcttgtggcctcactaaaggtggggtcgcttagtccccgggagtaaaatgagtgacctcagaaacaagaattcctggaaaggcacatgccgaagaggaatatggtataattttaaattttaatgcaaaattttaatttgtctttattttttatcatttgaactgataagcactttttgtgtcaatataaaatatactaaaactgatgaaatgctaagacatgtcttgtgaaggaaggtttcttggagaccacttttatttactcatgagaagtggaagctcctagtatcagaagaagctgatacatagtgtcatgtgctcagtggttgccaaagtctaccaactttggggagctgcagggttctttttgggaggtgggaggaagggagatgagttttgttattttggggttttcaagcattggaaccaaaggccaaataataaacagcctttagtttttaaagtaaaattcattttatttgcagagtacacttgtatggtagactgttaaagacaattttatgactatttatgcacattataatggttacatctgctttttgtctttaaaataaaaaaaaaaatcagagaaaagcccacctttgaatacgtggctgaagataacagccaagaattggtctttcctaaaaatgcaacagataatgctgctagattgttattttgtttgcacttttttttgattggcattttaaaatcggtatttaaactgaagacattgtcatgttttattaatttaacaaagttgaaagtgactgctctgtacatcatgaccttaacaatgttaatgctgtaagtgaaagttcactgtcgtctgtatactaaatttattggtgtttctaacttaaaagtaagactgcagattatcccccaccagccttagtccaggggtgtggctctgtccgggtgcagtatgcagtcatgtggaaccttgctttctagtcctgggaaaaaaagatgtctctaattactggcttcaataaacacgaatccagactgcttaaaaaaaaaaaaaaaaa

SEQ ID NO: 172 - DNA, 684 bp, Homo sapiens
  ref <308>: DATABASE ACCESSION NUMBER: NM_006274
cattcccagcctcacatcactcacaccttgcatttcacccctgcatcccagtcgccctgcagcctcacacagatcctgcacacacccagacagctggcgctcacacattcaccgttggcctgcctctgttcaccctccatggccctgctactggccctcagcctgctggttctctggacttccccagccccaactctgagtggcaccaatgatgctgaagactgctgcctgtctgtgacccagaaacccatccctgggtacatcgtgaggaacttccactaccttctcatcaaggatggctgcagggtgcctgctgtagtgttcaccacactgaggggccgccagctctgtgcacccccagaccagccctgggtagaacgcatcatccagagactgcagaggacctcagccaagatgaagcgccgcagcagttaacctatgaccgtgcagagggagcccggagtccgagtcaagcattgtgaattattacctaacctggggaaccgaggaccagaaggaaggaccaggcttccagctcctctgcaccagacctgaccagccaggacagggcctggggtgtgtgtgagtgtgagtgtgagcgagagggtgagtgtggtcagagtaaagctgctccacccccagattgcaatgctaccaataaagccgcctggtgtttacaactaa

SEQ ID NO: 173 - DNA, 1344 bp, Homo sapiens
  ref <308>: DATABASE ACCESSION NUMBER: NM_006344
ccaagaccagcaggactccagtcacctctaccccagctctccaggacacagcgctcccaactctgagtgacgtcccacctctggtccttgcagcacaaccaacgtgggaatcacaccctccagacctcccacagctccaccccagactgggcgccggccctgcctccatttcagctgtgacaacctcagagccgtgttggcccaagcatgacaaggacgtatgaaaacttccagtacttggagaataaggtgaaagtccaggggtttaaaaatgggccacttcctctccagtccctcctgcagcgtctccgctctgggccctgccatctcctgctgtccctgggcctcggcctgctgctgctggtcatcatctgtgtggttggattccaaaattccaaatttcagagggacctggtgaccctgagaacagattttagcaacttcacctcaaacactgtggcggagatccaggcactgacttcccagggcagcagcttggaagaaacgatagcatctctgaaagctgaggtggagggtttcaagcaggaacggcaggcagttcattctgaaatgctcctgcgagtccagcagctggtgcaagacctgaagaaactgacctgccaggtggctactctcaacaacaatggtgaggaagcctccactgaagggacctgctgccccgtcaactgggtggagcaccaagacagctgctactggttctctcactctgggatgtcctgggccgaggctgagaagtactgccagctgaagaacgcccacctggtggtcatcaactccagggaggagcagaattttgtccagaaatatctaggctccgcatacacctggatgggcctcagtgaccctgaaggagcctggaagtgggtggatggaacagactatgcgaccggcttccagaactggaagccaggccagccagacgactggcaggggcacgggctgggtggaggcgaggactgtgctcacttccatccagacggcaggtggaatgacgacgtctgccagaggccctaccactgggtctgcgaggctggcctgggtcagaccagccaggagagtcactgagctgcctttggtgggaccacccggccacagaaatggcggtgggaggaggactcttctcacgacctcctcgcaagaccgctctgggagagaaataagcactgggagattggaagcactgctaacattttgaatttttttctctttaattttaaaaagatggtatagtgttcttaagcttttattttttttccaacttttgaaagtcaacttcatgaaggtataatttttacataataaaaatgcactcatttaaagagt

SEQ ID NO: 174 - DNA, 857 bp, Homo sapiens
  ref <308>: DATABASE ACCESSION NUMBER: NM_006441
gcgtgggcgtgagatggcggcggcagcggtgagcagcgccaagcggagcctgcggggagagctgaagcagcgtctgcgggcgatgagtgccgaggagcggctacgccagtcccgcgtactgagccagaaggtgattgcccacagtgagtatcaaaagtccaaaagaatttccatctttctgagcatgcaagatgaaattgagacagaagagatcatcaaggacattttccaacgaggcaaaatctgcttcatccctcggtaccggttccagagcaatcacatggatatggtgagaatagaatcaccagaggaaatttctttacttcccaaaacatcctggaatatccctcagcctggtgagggtgatgttcgggaggaggccttgtccacagggggacttgatctcatcttcatgccaggccttgggtttgacaaacatggcaaccgactggggaggggcaagggctactatgatgcctatctgaagcgctgtttgcagcatcaggaagtgaagccctacaccctggcgttggctttcaaagaacagatttgcctccaggtcccagtgaatgaaaacgacatgaaggtagatgaagtcctttacgaagactcgtcaacagcttaaatctggattactacagccaaataatcagtgttttatatgagagtaaagcaaagtatgtgtatttttcccttgtcaaaaattagttgaaattgttcattaatgtgaatacagactgcattttaaaattgtaattatgaaataccttatataaaaccatctttaaaaaccaatagaagtgtgaatagtagaatattaattaaaatggaggctatcagcctgtgattttcagctt

SEQ ID NO: 175 - DNA, 3791 bp, Homo sapiens
  ref <308>: DATABASE ACCESSION NUMBER: NM_006461
acagacggcgggtgaacatggcgtcctcgacttggtctgagacgtgataggcctgccttctggttgaagatgtggcgagtgaaaaaactgagcctcagcctgtcgccttcgccccagacgggaaaaccatctatgagaactcctctccgtgaacttaccctgcagcccggtgccctcaccacctctggaaaaagatcccccgcttgctcctcgctgaccccatcactgtgcaagctggggctgcaggaaggcagcaacaactcgtctccagtggattttgtaaataacaagaggacagacttatcttcagaacatttcagtcattcctcaaagtggctagaaacttgtcagcatgaatcagatgagcagcctctagatccaattccccaaattagctctactcctaaaacgtctgaggaagcagtagacccactgggcaattatatggttaaaaccatcgtccttgtaccatctccactggggcagcaacaagacatgatatttgaggcccgtttagataccatggcagagacaaacagcatatctttaaatggacctttgagaacagacgatctggtgagagaggaggtggcaccctgcatgggagacaggttttcagaagttgctgctgtatctgagaaacctatctttcaggaatctccgtcccatctcttagaggagtctccaccaaatccctgttctgaacaactacattgctccaaggaaagcctgagcagtagaactgaggctgtgcgtgaggacttagtaccttctgaaagtaacgccttcttgccttcctctgttctctggctttccccttcaactgccttggcagcagatttccgtgtcaatcatgtggacccagaggaggaaattgtagagcatggagctatggaggaaagagaaatgaggtttcccacacatcctaaggagtctgaaacagaagatcaagcacttgtctcaagtgtggaagatattctgtccacatgcctgacaccaaatctagtagaaatggaatcccaagaagctccaggcccagcagtagaagatgttggtaggattcttggctctgatacagagtcttggatgtccccactggcctggctggaaaaaggtgtaaatacctccgtcatgctggaaaatctccgccaaagcttatcccttccctcgatgcttcgggatgctgcaattggcactacccctttctctacttgctcggtggggacttggtttactccttcagcaccacaggaaaagagtacaaacacatcccagacaggcctggttggcaccaagcacagtacttctgagacagagcagctcctgtgtggccggcctccagatctgactgccttgtctcgacatgacttggaagataacctgctgagctctcttgtcattgtggagtttctctcccgccagcttcgggactggaagagccagctggctgtccctcacccagaaacccaggacagtagcacacagactgacacatctcacagtgggataactaataaacttcagcatcttaaggagagccatgagatgggacaggccctacagcaggccagaaatgtcatgcaatcatgggtgcttatctctaaagagctgatatccttgcttcacctatccctgttgcatttagaagaagataagactactgtgaatcaggagtctcggcgtgcagaaacattggtctgttgctgttttgatttgctgaagaaattgagggcaaagctccagagcctcaaagcagaaagggaggaggcaaggcacagagaggaaatggctctcagaggcaaggatgcggcagagatagtgttggaggctttctgtgcacacgccagccagcgcatcagccagctggaacaggacctagcatccatgcgggaattcagaggccttctgaaggatgcccagacccaactggtagggcttcatgccaagcaagaagagctggttcagcagacagtgagtcttacttctaccttgcaacaagactggaggtccatgcaactggattatacaacatggacagctttgctgagtcggtcccgacaactcacagagaaactcacagtcaagagccagcaagccctgcaggaacgtgatgtggcaattgaggaaaagcaggaggtttctagggtgctggaacaagtctctgcccagttagaggagtgcaaaggccaaacagaacaactggagttggaaaacattcgtctagcaacagatctccgggctcagttgcagattctggccaacatggacagccagctaaaagagctacagagtcagcatacccattgtgcccaggacctggctatgaaggatgagttactctgccagcttacccagagcaatgaggagcaggctgctcaatgcgtaaaggaagagatggcactaaaacacatgcaggcagaactgcagcagcaacaagctgtcctggccaaagaggtgcgggacctgaaagagaccttggagtttgcagaccaggagaatcaggttgctcacctggagctgggtcaggttgagtgtcaattgaaaaccacactggaagtgctccgggagcgcagcttgcagtgtgagaacctcaaggacactgtagagaacctaacggctaaactggccagcaccatagcagataaccaggagcaagatctggagaaaacacggcagtactctcaaaagctagggctgctgactgagcaactacagagcctgactctctttctacagacaaaactaaaggagaagactgaacaagagacccttctgctgagtacagcctgtcctcccacccaggaacaccctctgcctaatgacaggaccttcctgggaagcatcttgacagcagtggcagatgaagagccagaatcaactcctgtgcccttgcttggaagtgacaagagtgctttcacccgagtagcatcaatggtttcccttcagcccgcagagaccccaggcatggaggagagcctggcagaaatgagtattatgactactgagcttcagagtctttgttccctgctacaagagtctaaagaagaagccatcaggactctgcagcgaaaaatttgtgagctgcaagctaggctgcaggcccaggaagaacagcatcaggaagtccagaaggcaaaagaagcagacatagagaagctgaaccaggccttgtgcttgcgctacaagaatgaaaaggagctccaggaagtgatacagcagaatgagaagatcctagaacagatagacaagagtggcgagctcataagccttagagaggaggtgacccaccttacccgctcacttcggcgtgcggagacagagaccaaagtgctccaggaggcctggcaggccagctggactccaactgccagcctatggccaccaattggatccaggagaaagtgtggctctctcaggaggtggacaaactgagagtgatgttcctggagatgaaaaatgagaaggaaaactcctgatcaagttccagagcccatagaaatatcctagaggagaaccttcggcgctctgacaaggagttagaaaaactagatgacattgttcagcatatttataagaccctgctctctattccagaggtggtgaggggatgcaaagaactacagggattgctggaatttctgagctaagaaactgaaagccagaatttgtttcacctctttttacctgcaatacccccttaccccaataccaagaccaactggcatagagccaactgagataaatgctatttaaataaagtgtatttaatgaaaaaaaaaaaaaaaaaaaaa

SEQ ID NO: 176 - DNA, 7650 bp, Homo sapiens
  ref <308>: DATABASE ACCESSION NUMBER: NM_006614
cggaccctgcgcgcccccgtcccggctcccggccggctcgggggagaaggcgcccgaggggaggcgccggacagatcgcgtttcggaggcggcgcaggtgctgtaaactgcaaaccataatcctgtcttaatactgcaaacaaatcatagtggaactaaggggaacttaatttactgtttccaggttaactaaggtctcagctgtaaaccaaaagtgagaggagacattaagattttcattcttaccgggttgtcttcttcctgaagagcaatggagccgcttttacttggaagaggactaatcgtatatctaatgttcctcctgttaaaattctcaaaagcaattgaaataccatcttcagttcaacaggttccaacaatcataaaacagtcaaaagtccaagttgcctttcccttcgatgagtattttcaaattgaatgtgaagctaaaggaaatccagaaccaacattttcgtggactaaggatggcaaccctttttatttcactgaccatcggataattccatcgaacaattcaggaacattcaggatcccaaacgaggggcacatatctcactttcaagggaaataccgctgctttgcttcaaataaactgggaatcgctatgtcagaagaaatagaatttatagttccaagtgttccaaaattcccaaaagaaaaaattgaccctcttgaagtggaggagggagatccaattgtcctcccatgcaatcctcccaaaggcctcccacctttacacatttattggatgaatattgaattagaacacatcgaacaagatgaaagagtatacatgagccaaaagggagatctatacttcgcaaacgtggaagaaaaggacagtcgcaatgactactgttgctttgctgcatttccaagattaaggactattgtacagaaaatgccaatgaaactaacagttaacagtttaaagcatgctaatgactcaagttcatccacagaaattggttccaaggcaaattccatcaagcaaagaaaacccaaactgctgttgcctcccactgagagtggcagtgagtcttcaattaccatcctcaaaggggaaatcttgctgcttgagtgttttgctgaaggcttgccaactccacaggttgattggaacaaaattggtggtgacttaccaaaggggagagaaacaaaagaaaattatggcaagactttgaagatagagaatgtctcctaccaggacaaaggaaattatcgctgcacagccagcaatttcttgggaacagccactcacgattttcacgttatagtagaagagcctcctcgctggacaaagaagcctcagagtgctgtgtatagcaccggaagcaatggcatcttgttatgtgaggctgaaggagaacctcaacccacaatcaagtggagagtcaatggctccccagttgacaatcatccatttgctggtgatgttgtcttccccagggaaatcagttttaccaaccttcaaccaaatcatactgctgtgtaccagtgtgaagcctcaaatgtccatggaactatccttgccaatgccaatattgatgttgtggatgtccgtccattgatacaaaccaaagatggagaaaattacgctacagtggttgggtacagtgctttcttacattgcgagttctttgcttcacctgaggcagtcgtgtcctggcagaaggtggaagaagtgaaacccctggagggcaggcggtatcatatctatgaaaatggcacattgcagatcaacagaaccaccgaagaagatgctgggtcttactcatgttgggtagaaaatgctataggaaaaactgcagtcacagccaatttggatattagaaatgctacaaaacttagagtttctcctaagaatcctcgtatccccaaattgcatatgcttgaattacattgtgaaagcaaatgtgactcacatttgaaacacagtttgaagttgtcctggagtaaagatggagaagcctttgaaattaatggcacagaagatggcaggataattattgatggagctaatttgaccatatctaatgtaactttagaggaccaaggtatttactgctgttcagctcatactgctctagacagtgctgccgatataactcaagtaactgttcttgatgttccggatccaccagaaaaccttcacttgtctgaaagacagaacaggagtgttcggctgacctgggaagctggagctgaccacaacagcaatattagcgagtatattgttgaatttgaaggaaacaaagaagagcctggaaggtgggaggaactgaccagagtccaaggaaagaaaaccacagttatcttacctttggctccatttgtgagataccagttcagggtcatagccgtgaacgaagtagggagaagtcagcctagccagccgtcagaccatcatgaaacaccaccagcagctccagataggaatccacaaaacataagggttcaagcctctcaacccaaggaaatgattataaagtgggagcctttgaaatccatggagcagaatggaccaggcctagagtacagagtgacctggaagccacagggagccccagtggagtgggaagaagaaacagtcacaaaccacacattgcgggtgatgacgcctgctgtctatgccccttatgatgtcaaggtccaggctatcaatcaactaggatctgggcctgaccctcagtcagtgactctctattctggagaagactatcctgatacagctccagtgatccatggggtggacgttataaacagtacattagttaaagttacctggtcaacagttccaaaggacagagtacatggacgtctgaaaggctatcagataaattggtggaaaacaaaaagtctgttggatggaagaacacatcccaaagaagtgaacattctaagattttcaggacaaagaaactctggaatggttccttccttagatgcctttagtgaatttcatttaacagtcttagcctataactctaaaggagctggtcctgaaagtgagccttatatatttcaaacaccagaaggagtacctgaacagccaacttttctaaaggtcatcaaagttgataaagacactgccactttatcttggggactacctaagaaattaaatggaaacttaactggctatcttttgcaatatcagataataaatgacacctacgagattggagaattaaatgatattaacattacaactccatcaaagcccagctggcacctctcaaacctgaatgcaactaccaagtacaaattctacttgagggcttgcacttcacagggctgtggaaaaccgatcacggaggaaagctccaccttaggagaagggagtaaaggtatcgggaagatatcaggagtaaatcttactcaaaagactcacccaatagaggtatttgagccgggagctgaacatatagttcgcctaatgactaagaattggggcgataatgatagcatttttcaagatgtaattgagacaagagggagagaatatgctggtttatatgatgacatctccactcaaggctggtttattggactgatgtgtgcgattgctcttctcacactactattattaactgtttgctttgtgaagaggaatagaggtggaaagtactcagttaaagaaaaggaagatttgcatccagacccagaaattcagtcagtaaaagatgaaacctttggtgaatacagtgacagtgatgaaaagcctctcaaaggaagccttcggtcccttaatagggatatgcagcctactgaaagtgctgacagcttagtcgaatacggagagggagaccatggtctcttcagtgaagatggatcatttattggtgcctacgctggatctaaggagaagggatctgttgaaagcaatggaagttctacagcaacttttccccttcgggcataaacacaacatatgtaagcaacgctactggttcaccccaaccttccatatttatctgttcaaaggagcaagaactttcatataggaatagaaacatgctggccgaagatttcatccagaagtcaacatcctgcaattatgttgaaaagagtagtactttcttcaaaatataaaatgccaagcacttcaggcctatgttttgcttatattgttttcaggtgctcaaaatgcaaaacacaaaacaaatcctgcatttagatacacctcaactaaatccaaagtccccattcagtatattccatatttgcctgattttactattcggtgtgtttgcatagatgttgctacttggtgggtttttctccgtatgcacattggtatacagtctctgagaactggcttggtgactttgcttcactacaggttaaaagaccataagcaaactggttatttaaaatgtaaaaaggaatatgaaagtcttattaaaacacttcattgaaaatatacagtctaaatttattatttaaattttactagcaaaagtcttaggtgaacaatcaactagtatttgttgagctcctatttgcccagagatggtcatatttaaacagaagtatacgtttttcagtttcaacatgaatttttttatttctgtcagttatgacatccacaagcatcactttttgtgtctgttttttttttttttcttggactaaattcaactgcatggaagcggtggtcagaaggttgttttatacgagaacaggcagaaagtgcccattgttcaggattctaatagctacatctacttaatatcttcatttctaaattgactgcttttacctttttctcatgtttatataatggtatgcttgcatatatttcatgaatacattgtacatattatgttaatatttacacaatttaaaatatagatgtgttttattttgaagtgagaaaatgaacattaacaggcatgtttgtacagctagaatatattagtaagatactgtttttcgtcattccagagctacaactaataacacgaggttccaaagctgaagactttgtataaagtatttgggttttgttcttgtattgctttctttcaacagtttcaaaataaaatatcatataaatattgagggaaatgttttcatatttttcaaaataggtttttattgttgaatgtacatctaccccagcccctcaaaagaaaaactgtttacatagaaattcctacacatacgtttgcgtatatgttattttaaacatctttgtggtgagaattttttccccgatattctccttctgtcaaagtcagaacaaattcagggaatttattttctggcagttgtgctccagtccttttaaaattgtacatgaacatgttttagaaacaatatggaggatgatgcatacatgtcggtcaagttcagcgctcgacattttatggaaagatttttttaaccttaccacgaaatacttaactactgtttaagtgaattgacttatttcactttagtttttgaactgtgattattggtatactgttatatcctcaacttggatttatggtaaccccttatagttcatggagaccaaaatttggggtatttataatagtcagcgcaggaatgcacatggaatatctacttgtccttttgaacctcacgagtcatccagaatgtatagacaggaaaagcatgtcttatttaaaactgtaatttatgggctcaggatctgaccgcagtcccgggagtaagcatttcaaagggggaaggcagtgtggtccctaccctgtgtgaatgtgaggatgtagacatccatcagtgcaactcgagctccatcctcctccgatttctaaggttccagttttctggagggacagtcatcatgttttgatttatctgggagaaaactgtggtgcacagcttgtgaggagggcaaggttgtgacgttcgagcttagttctggtgttattctgtctcctcttctttgtcatcagccaaaacgtggtttttaaagagagtcatgcaggttagaaataatgtcaaaaatatttaggaatttaataacctttaagtcagaaactaaaacaaatactgaaatattagctcttcctacacttcgtgttcccctttagctgcctgaaaatcaagattgctcctgctcagatcttctgagtggctaaaacttatggatatgaaaaatgagattgaatgatgactatgctttgctatcattgttacctttcctcaatactatttggcaactactgggactcttcagcacaaaaggaatagatctatgattgaccctgattttaattgtgaaattatatgattcatatattttatgaatcagaataaccttcaaataaaataaatctaagtcggttaaaatggatttcatgattttccctcagaaaatgagtaacagagtccacggcgtgcaatggtaattataaattggtgatgcttgtttgcaaattgcccactcgtgataagtcaacagccaatatttaaaactttgttcgttactggctttaccctaactttctctagtctactgtcaatatcattttaatgtaattgattgtatatagtctcaagaatggttggtgggcatgagttcctagagaactgtccaagggttgggaaaatccaaattctcttcctggttccagcactgattttgtacataaacattaggcaggttgcttaacctttttatttcaaactctctcaactctaaagtgctaataataatctcagttaccttatctttgtcacagggtgttcttttttatgaagaaaaatttgaaaatgataaaagctaagatgccttctaacttcataagcaaacctttaactaattatgtatctgaaagtcacccccacataccaactcaacttttttcctgtgaacacataaatatatttttatagaaaaacaaatctacataaaataaatctactgtttagtgagcagtatgatttgtacatgccattgaaaattattaatcagaagaaaattaagcagggtctttgctatacaaaagtgttttccactaattttgcatgcgtatttataagaaaaatgtgaatttggtggttttattctatcggtataaaggcattgatattttagatgcacccgtgtttgtaaaaatgtagagcacaatggaattatgctggaagtctcaaataatatttttttcctattttatactcatggaagagataagctaaagaggggacaataatgagaaatgttggtgtgcttttctaagcatttaaaacataattgccaattgaaaccctaaatatgtttacataccattaagatatgattcatgtaacaatgttaaattaattataatgggattgggtttgttatctgtggtagtatatatcctagtgttcctatagtgaaataagtagggttcagccaaagctttctttgttttgtaccttaaattgttcgattacgtcatcaaaagagatgaaaggtatgtagaacaggttcacgtgattacctttttcttttggcttggattaatattcatagtagaactttataaaacgtgtttgtattgtaggtggtgtttgtattatgcttatgactatgtatggtttgaaaatattttcattatacatgaaattcaactttccaaataaaagttctacttcatgtaatccaaa

SEQ ID NO: 177 - DNA, 2154 bp, Homo sapiens
  ref <308>: DATABASE ACCESSION NUMBER: NM_006636
atataaccgcgtggcccgcgcgcgcgcttccctcccggcgcagtcaccggcgcggtctatggctgcgacttctctaatgtctgctttggctgcccggctgctgcagcccgcgcacagctgctcccttcgccttcgccctttccacctcgcggcagttcgaaatgaagctgttgtcatttctggaaggaaactggcccagcagatcaagcaggaagtgcggcaggaggtagaagagtgggtggcctcaggcaacaaacggccacacctgagtgtgatcctggttggcgagaatcctgcaagtcactcctatgtcctcaacaaaaccagggcagctgcagttgtgggaatcaacagtgagacaattatgaaaccagcttcaatttcagaggaagaattgttgaatttaatcaataaactgaataatgatgataatgtagatggcctccttgttcagttgcctcttccagagcatattgatgagagaaggatctgcaatgctgtttctccagacaaggatgttgatggctttcatgtaattaatgtaggacgaatgtgtttggatcagtattccatgttaccggctactccatggggtgtgtgggaaataatcaagcgaactggcattccaaccctagggaagaatgtggttgtggctggaaggtcaaaaaacgttggaatgcccattgcaatgttactgcacacagatggggcgcatgaacgtcccggaggtgatgccactgttacaatatctcatcgatatactcccaaagagcagttgaagaaacatacaattcttgcagatattgtaatatctgctgcaggtattccaaatctgatcacagcagatatgatcaaggaaggagcagcagtcattgatgtgggaataaatagagttcacgatcctgtaactgccaaacccaagttggttggagatgtggattttgaaggagtcagacaaaaagctgggtatatcactccagttcctggaggtgttggccccatgacagtggcaatgctaatgaagaataccattattgctgcaaaaaaggtgctgaggcttgaagagcgagaagtgctgaagtctaaagagcttggggtagccactaattaactactgtgtcttctgtgtcacaaacagcactccaggccagctcaagaagcaaagcaggccaatagaaatgcaatatttttaatttattctactgaaatggtttaaaatgatgccttgtatttattgaaagcttaaatgggtgggtgtttctgcacatacctctgcagtacctcaccagggagcattccagtatcatgcagggtcctgtgatctagccaggagcagccattaacctagtgattaatatgggagacattaccatatggaggatggatgcttcactttgtcaagcacctcagttacacattcgccttttctaggattgcatttcccaagtgctattgcaataacagttgatactcattttaggtaccagaccttttgagttcaactgatcaaaccaaaggaaaagtgttgctagagaaaattggggaaaaggtgaaaaagaaaaaatggtagtaattgagcagaaaaaaattaatttatatatgtattgattggcaaccagatttatctaagtagaactgaattggctaggaaaaaagaaaaactgcatgttaatcattttcctaagctgtccttttgaggcttagtcagtttattgggaaaatgtttaggattattccttgctattagtactcattttatgtatgttacccttcagtaagttctccccattttagttttctaggactgaaaggattcttttctacattatacatgtgtgttgtcatatttggcttttgctatatactttaacttcattgttaaatttttgtattgtatagtttctttggtgtatcttaaaacctatttttgaaaaacaaacttggcttgataatcatttgggcagcttgggtaagtacgcaacttacttttccaccaaagaactgtcagcagctgcctgcttttctgtgatgtatgtatcctgttgacttttccagaaattttttaagagtttgagttactattgaatttaatcagactttctgattaaagggttttctttcttttttaataaaacacatctgtctggtatggta

SEQ ID NO: 178 - DNA, 3685 bp, Homo sapiens
  ref <308>: DATABASE ACCESSION NUMBER: NM_006749
gcttccggaagcgggcgactcgcagctccacgcgacgccgaggggctccgcgccgggaccgggcgggtgctcggagtttcggggaccgcacgggaccgagggcaggaggagacatcacagctttcccagatcgggaggaaaaatatggaatgtgttttaccgctgactgaacacaaccaaatgaactgtcctgacagtagtttgcaaaccagcagctagcagtttgtccagcctctaacattgtccagcactttccagagcaaactcactgtttacaagaactcttggccttacgaagtttataacctcaagctttgtttatttaaaatattcctgcaaaagaaaagtacccggcacccactttccaaaatggccatggatgagtatttgtggatggtcattttgggtttcatcatagctttcatcttggccttttctgttggtgcaaacgatgttgccaactcctttggtacagccgtgggctctggtgtggtgaccttgaggcaggcatgcattttagcttcaatatttgaaaccaccggctccgtgttactaggcgccaaagtaggagaaaccattcgcaaaggtatcattgacgtgaacctgtacaacgagacggtggagactctcatggctggggaagttagtgccatggttggttccgctgtgtggcagctgattgcttccttcctgaggcttccaatctcaggaacgcactgcattgtgggttctactataggattctcactggtcgcaatcggtaccaaaggtgtgcagtggatggagcttgtcaagattgttgcttcttggtttatatctccactgttgtctggtttcatgtctggcctgctgtttgtactcatcagaattttcatcttaaaaaaggaagaccctgttcccaatggcctccgggcactcccagtattctatgctgctaccatagcaatcaatgtcttttccatcatgtacacaggagcaccagtgctcggccttgttctccccatgtgggccatagccctcatttcctttggtgtcgccctcctgttcgctttttttgtgtggctcttcgtgtgtccgtggatgcggaggaaaataacaggcaaattacaaaaagaaggtgctttatcacgagtatctgacgaaagcctcagtaaggttcaggaagcagagtccccagtatttaaagagctaccaggtgccaaggctaatgatgacagcaccatcccgctcacgggagcagcaggggagacactggggacctcggaaggcacttctgcgggcagccaccctcgggctgcatacggaagagcactgtccatgacccatggctctgtgaaatcgcccatctccaacggcaccttcggcttcgacggccacaccaggagcgacggtcatgtgtaccacaccgtgcacaaagactcggggctctacaaagatctgctgcacaaaatccacatcgacaggggccccgaggagaagccagcccaggaaagcaactaccggctgctgcgccgaaacaacagttacacctgctacaccgcagccatttgtgggctgccagtgcacgccacctttcgagctgcggactcatcggccccagaggacagtgagaagctggtgggcgacaccgtgtcctactccaagaagaggctgcgctacgacagctactcgagctactgtaacgcggtggcagaggcggagatcgaggcggaggagggcggcgtggagatgaagctggcgtcggagctggccgaccctgaccagccgcgagaggaccctgcagaggaggagaaggaggagaaggacgcacccgaggttcacctcctgttccatttcctgcaggtcctcaccgcctgtttcgggtcctttgctcacggcggcaatgacgtgagtaatgccatcggtcccctggtagccttgtggctgatttacaaacaaggcggggtaacgcaagaagcagctacacccgtctggctgctgttttatggaggagttggaatctgcacaggcctctgggtctgggggagaagagtgatccagaccatggggaaggacctcactcccatcacgccgtccagcggcttcacgatcgagctggcctcagccttcacagtggtgatcgcctccaacatcgggcttccagtcagcaccacgcactgtaaggtgggctcggtggtggccgtgggctggatccgctcccgcaaggctgtggactggcgcctctttcggaacatcttcgtggcctggttcgtgaccgtccctgtggctgggctgttcagcgctgctgtcatggctcttctcatgtatgggatccttccatatgtgtgatttgtcttcttccagctgcaaacagctaaagggatggtctggtgttggcgtgtgggagacatgtgtgctcgtgccacacatacacatcctggccgtgcacggctctctcatgaccagctctctgcctcccttccaggaggctccatcccacactgttcacccaggctgcggagactcaccttcccgagctaacttaactactgtacataataatatgtattaaactggtatcgtggtgatataatgtggtgcagttacttatatattaaatatctattgtatccatagaataggcagcattatttcaaacatattcaagttgggagtggagatcattgcctagaagtcaatattcaataaatcttgtacataactatttcgatggcaaatgttaagccttctaaaaggaaagtgtagattggaaaatgattttttttccaaatgatgtttttgccttctaatatactgtaaggtaatgagcttcagaacaggcaacctgaccctgcagaggtcgcgtgctgtgggatgacagcgggacgggagctcacaagtgctttcactgaagatttgttcatatactgtgtattgattgttgtgtaatatatcatcattgcttttgtaaatacgtaaaactgtaattttttaatggtgtgcttcccttatacttttttgatcagagaattttggaaagtaccaaagaagcaggggaatcattggccagtgttacgttttcacattgtctgtctcccaccctcactgatcacgcctgccccagagcagtgtgtggcggtgacaccgtcacccagcatgcgccacgccgtggctcccaccagcagtgccaccgccaccacaccccagatcccacccaccttgcagtggcctttccttgtcatcagagtagagaatgcacaggtgttggtgagggcgtgtggctgagcactacatgtcaagtccagagtcagtttctatcccaattctccctgcagcctgaagaacggatccttgtctccaatgtcagcacaaaggaggctttttctgtgctttgacattctagcacttcagggatgagagggagggagaatcctggatgctggatggagtatttctctgaggcccacacaaagctggacacccccaggctctactccatcccattggagtctcttctttttttgatagcgggagggaggaagtacgactaatgttggagcctgaaactatggaaatgctgctaaaatttttatattgacaaacattttcttggtacttcattgtcatttttcattaatcaaccatattaaatttataataaaaaatgcccctcagaaaaaaaaaaaaaaagaaaaaaaaaaaaaaa

SEQ ID NO: 179 - DNA, 2166 bp, Homo sapiens
  ref <308>: DATABASE ACCESSION NUMBER: NM_006826
gtggtgggactcgcgtcgcggccgcggagacgtgaagctctcgaggctcctcccgctgcgggtcggcgctcgccctcgctctcctcgccctccgccccggccccggccccgcgcccgccatggagaagactgagctgatccagaaggccaagctggccgagcaggccgagcgctacgacgacatggccacctgcatgaaggcagtgaccgagcagggcgccgagctgtccaacgaggagcgcaacctgctctccgtggcctacaagaacgtggtcgggggccgcaggtccgcctggagggtcatctctagcatcgagcagaagaccgacacctccgacaagaagttgcagctgattaaggactatcgggagaaagtggagtccgagctgagatccatctgcaccacggtgctggaattgttggataaatatttaatagccaatgcaactaatccagagagtaaggtcttctatctgaaaatgaagggtgattacttccggtaccttgctgaagttgcgtgtggtgatgatcgaaaacaaacgatagataattcccaaggagcttaccaagaggcatttgatataagcaagaaagagatgcaacccacacacccaatccgcctggggcttgctcttaacttttctgtattttactatgagattcttaataacccagagcttgcctgcacgctggctaaaacggcttttgatgaggccattgctgaacttgatacactgaatgaagactcatacaaagacagcaccctcatcatgcagttgcttagagacaacctaacactttggacatcagacagtgcaggagaagaatgtgatgcggcagaaggggctgaaaactaaatccatacagggtgtcatccttctttccttcaagaaacctttttacacatctccattccttattccacttggatttcctatagcaaagaaacccattcatgtgtatggaatcaactgtttatagtcttttcacactgcagctttgggaaaacttcattccttgatttgtgtttgtcttggccttcctggtgtgcagtactgctgtagaaaagtattaatagcttcatttcatataaacataagtaactcccaaacacttatgtagaggactaaaaatgtatctggtatttaagtaatctgaaccagttctgcaagtgactgtgttttgtattactgtgaaaataagaaaatgtagttaattacaatttaaagagtattccacataacttcttaatttctacattccctcccttactcttcgggggtttcctttcagtaagcaacttttccatgctcttaatgtattcctttttagtaggaatccggaagtattagattgaatggaaaagcacttgccatctctgtctaggggtcacaaattgaaatggctcctgtatcacatacggaggtcttgtgtatctgtggcaacagggagtttccttattcactctttatttgctgctgtttaagttgccaacctcccctcccaataaaaattcacttacacctcctgcctttgtagttctggtattcactttactatgtgatagaagtagcatgttgctgccagaatacaagcattgcttttggcaaattaaagtgcatgtcatttcttaatacactagaaaggggaaataaattaaagtacacaagtccaagtctaaaactttagtacttttccatgcagatttgtgcacatgtgagagggtgtccagtttgtctagtgattgttatttagagagttggaccactattgtgtgttgctaatcattgactgtagtcccaaaaaagccttgtgaaaatgttatgccctatgtaacagcagagtaacataaaataaaagtacattttataaaccatttactatggctttgtaacaattgcatacccatattttaagggacaggtgaatttactactttctaaagtttattgatacttcccttttatgtaaaatgtagtagtgatacctatatttccacattgtgcattgtgacacacttgtctagggatgcctggaagtgtataaaattggactgcatttcttagagtgttttactatagatcagtctcatgggccatctcttcctcagatgtaaatgatatctggttaagtgttatatggaataaagtggacattttaaaacta

SEQ ID NO: 180 - DNA, 419 bp, Homo sapiens
  ref <308>: DATABASE ACCESSION NUMBER: NM_006829
ctcttgacgactccacagataccccgaagccatggcaagcaagggcttgcaggacctgaagcaacaggtggaggggaccgcccaggaagccgtgtcagcggccggagcggcagctcagcaagtggtggaccaggccacagaggcggggcagaaagccatggaccagctggccaagaccacccaggaaaccatcgacaagactgctaaccaggcctctgacaccttctctgggatcgggaaaaaattcggcctcctgaaatgacagcagggagacttgggtcggcctcctgaaatgatagcagggagacttgggtgaccccccttccaggcgccatctagcacagcctggccctgatctccgggcagccaccacctcctcggtctgccccctcattaaaattcacgttcccaccctgaaa

SEQ ID NO: 181 - DNA, 2825 bp, Homo sapiens
  ref <308>: DATABASE ACCESSION NUMBER: NM_006845
gcgaaattgaggtttcttggtattgcgcgtttctcttccttgctgactctccgaatggccatggactcgtcgcttcaggcccgcctgtttcccggtctcgctatcaagatccaacgcagtaatggtttaattcacagtgccaatgtaaggactgtgaacttggagaaatcctgtgtttcagtggaatgggcagaaggaggtgccacaaagggcaaagagattgattttgatgatgtggctgcaataaacccagaactcttacagcttcttcccttacatccgaaggacaatctgcccttgcaggaaaatgtaacaatccagaaacaaaaacggagatccgtcaactccaaaattcctgctccaaaagaaagtcttcgaagccgctccactcgcatgtccactgtctcagagcttcgcatcacggctcaggagaatgacatggaggtggagctgcctgcagctgcaaactcccgcaagcagttttcagttcctcctgcccccactaggccttcctgccctgcagtggctgaaataccattgaggatggtcagcgaggagatggaagagcaagtccattccatccgtggcagctcttctgcaaaccctgtgaactcagttcggaggaaatcatgtcttgtgaaggaagtggaaaaaatgaagaacaagcgagaagagaagaaggcccagaactctgaaatgagaatgaagagagctcaggagtatgacagtagttttccaaactgggaatttgcccgaatgattaaagaatttcgggctactttggaatgtcatccacttactatgactgatcctatcgaagagcacagaatatgtgtctgtgttaggaaacgcccactgaataagcaagaattggccaagaaagaaattgatgtgatttccattcctagcaagtgtctcctcttggtacatgaacccaagttgaaagtggacttaacaaagtatctggagaaccaagcattctgctttgactttgcatttgatgaaacagcttcgaatgaagttgtctacaggttcacagcaaggccactggtacagacaatctttgaaggtggaaaagcaacttgttttgcatatggccagacaggaagtggcaagacacatactatgggcggagacctctctgggaaagcccagaatgcatccaaagggatctatgccatggcctcccgggacgtcttcctcctgaagaatcaaccctgctaccggaagttgggcctggaagtctatgtgacattcttcgagatctacaatgggaagctgtttgacctgctcaacaagaaggccaagctgcgcgtgctggaggacggcaagcaacaggtgcaagtggtggggctgcaggagcatctggttaactctgctgatgatgtcatcaagatgctcgacatgggcagcgcctgcagaacctctgggcagacatttgccaactccaattcctcccgctcccacgcgtgcttccaaattattcttcgagctaaagggagaatgcatggcaagttctctttggtagatctggcagggaatgagcgaggcgcagacacttccagtgctgaccggcagacccgcatggagggcgcagaaatcaacaagagtctcttagccctgaaggagtgcatcagggccctgggacagaacaaggctcacaccccgttccgtgagagcaagctgacacaggtgctgagggactccttcattggggagaactctaggacttgcatgattgccacgatctcaccaggcataagctcctgtgaatatactttaaacaccctgagatatgcagacagggtcaaggagctgagcccccacagtgggcccagtggagagcagttgattcaaatggaaacagaagagatggaagcctgctctaacggggcgctgattccaggcaatttatccaaggaagaggaggaactgtcttcccagatgtccagctttaacgaagccatgactcagatcagggagctggaggagaaggctatggaagagctcaaggagatcatacagcaaggaccagactggcttgagctctctgagatgaccgagcagccagactatgacctggagacctttgtgaacaaagcggaatctgctctggcccagcaagccaagcatttctcagccctgcgagatgtcatcaaggccttacgcctggccatgcagctggaagagcaggctagcagacaaataagcagcaagaaacggccccagtgacgactgcaaataaaaatctgtttggtttgacacccagcctcttccctggccctccccagagaactttgggtacctggtgggtctaggcagggtctgagctgggacaggttctggtaaatgccaagtatgggggcatctgggcccagggcagctggggagggggtcagagtgacatgggacactccttttctgttcctcagttgtcgccctcacgagaggaaggagctcttagttacccttttgtgttgcccttctttccatcaaggggaatgttctcagcatagagctttctccgcagcatcctgcctgcgtggactggctgctaatggagagctccctggggttgtcctggctctggggagagagacggagcctttagtacagctatctgctggctctaaaccttctacgcctttgggccgagcactgaatgtcttgtactttaaaaaaatgtttctgagacctctttctactttactgtctccctagagtcctagaggatccctactgttttctgttttatgtgtttatacattgtatgtaacaataaagagaaaaaataaaaaaaaaaaaaaaaaaaaaaaaaaaaaaaa

SEQ ID NO: 182 - DNA, 1246 bp, Homo sapiens
  ref <308>: DATABASE ACCESSION NUMBER: NM_006983
ctgccccatgcagccctgagccccacagcaagtctgccatgggccgcggggcccgtgtcccctcggaggccccgggggcaggcgtcgagcgccgctggcttggagccgcgctggtcgccctgtgcctcctccccgcgctggtgctgctggcccggctgggggccccggcggtgccggcctggagcgcagcgcagggagacgtcgctgcgctgggcctctcggcggtcccccccacccgggtcccgggcccactggccccccgcagacgccgctacacgctgactccagccaggctgcgctgggaccacttcaacctcacctacaggatcctctccttcccgcggaacctgctgagcccgcgggagacgcggcgggccctagctgccgccttccgcatgtggagcgacgtgtcccccttcagcttccgcgaggtggcccccgagcagcccagcgacctccggataggcttctacccgatcaaccacacggactgcctggtctccgcgctgcaccactgcttcgacggccccacgggggagctggcccacgccttcttccccccgcacggcggcatccacttcgacgacagcgagtactgggtcctgggccccacgcgctacagctggaagaaaggcgtgtggctcacggacctggtgcacgtggcggcccacgagatcggccacgcgctgggcctgatgcactcacaacacggccgggcgctcatgcacctgaacgccacgctgcgcggctggaaggcgttgtcccaggacgagctgtgggggctgcaccggctctacggatgcctcgacaggctgttcgtgtgcgcgtcctgggcgcggaggggcttctgcgacgctcgccggcggctcatgaagaggctctgccccagcagctgcgacttctgctacgaattccccttccccacggtggccaccaccccaccgccccccaggaccaaaaccaggctggtgcccgagggcaggaacgtgaccttccgctgcggccagaagatcctccacaagaaagggaaagtgtactggtacaaggaccaggagcccctggagttctcctaccccggctacctggccctgggcgaggcgcacctgagcatcatcgccaacgccgtcaatgagggcacctacacctgcgtggtgcgccgccagcagcgcgtgctgaccacctactcctggcgagtccgtgtgcggggctgagcccggctgataaagcactttctctctgaaaaaaa

SEQ ID NO: 183 - DNA, 823 bp, Homo sapiens
  ref <308>: DATABASE ACCESSION NUMBER: NM_007019
aaacgcgggcgggcgggcccgcagtcctgcagttgcagtcgtgttctccgagttcctgtctctctgccaacgccgcccggatggcttcccaaaaccgcgacccagccgccactagcgtcgccgccgcccgtaaaggagctgagccgagcgggggcgccgcccggggtccggtgggcaaaaggctacagcaggagctgatgaccctcatgatgtctggcgataaagggatttctgccttccctgaatcagacaaccttttcaaatgggtagggaccatccatggagcagctggaacagtatatgaagacctgaggtataagctctcgctagagttccccagtggctacccttacaatgcgcccacagtgaagttcctcacgccctgctatcaccccaacgtggacacccagggtaacatatgcctggacatcctgaaggaaaagtggtctgccctgtatgatgtcaggaccattctgctctccatccagagccttctaggagaacccaacattgatagtcccttgaacacacatgctgccgagctctggaaaaaccccacagcttttaagaagtacctgcaagaaacctactcaaagcaggtcaccagccaggagccctgacccaggctgcccagcctgtccttgtgtcgtctttttaatttttccttagatggtctgtcctttttgtgatttctgtataggactctttatcttgagctgtggtatttttgttttgtttttgtcttttaaattaagcctcggttgagcccttgtatattaaataaatgcatttttgtccttttttagacaaaaaaaaaaaaaaa

SEQ ID NO: 184 - DNA, 1658 bp, Homo sapiens
  ref <308>: DATABASE ACCESSION NUMBER: NM_007057
ggcacgagctcggctcctggaaagatggaggcagcggagacagaggcggaagctgcagccctagaggtcctggctgaggtggcaggcatcttggaacctgtaggcctgcaggaggaggcagaactgccagccaagatcctggttgagtttgtggtggactctcagaagaaagacaagctgctctgcagccagcttcaggtagcggatttcctgcagaacatcctggctcaggaggacactgctaagggtctcgaccccttggcttctgaagacacgagccgacagaaggcaattgcagctaaggaacaatggaaagagctgaaggccacctacagggagcacgtagaggccatcaaaattggcctcaccaaggccctgactcagatggaggaagcccagaggaaacggacacaactccgggaagcctttgagcagctccaggccaagaaacaaatggccatggagaaacgcagagcagtccagaaccagtggcagctacaacaggagaagcatctgcagcatctggcggaggtttctgcagaggtgagggagcgtaagacagggactcagcaggagcttgacagggtgtttcagaaacttggaaacctgaagcagcaggcagaacaggagcgggacaagctgcagaggtatcagaccttcctccagcttctgtataccctgcagggtaagctgttgttccctgaggctgaggctgaggcagagaatcttccagatgataaaccccagcagccgactcgaccccaggagcagagtacaggagacaccatggggagagaccctggtgtgtccttcaaggctgttggtctacaacctgctggagatgtaaatttgccatgacttcctggaggacagcagcatggagaaagatcctagaaaaggcctctgacttccctcacctcccaaccatcattacaggaaagactgtgaactcctgagttcagcttgatttctgactacatcccagcaagctctggcatctgtggattaaaatccctggatctctctcagttgtgtatttgttcatcttcatatgctggcaggaacaactattaatacagatactcagaagccaataacatgacaggagctgggactggtttgaacacagggtgtgcagatggggagggggtactggccttgggcctcctatgatgcagacatggtgaatttaattcaaggaggaggagaatgttttaggcaggtggttatatgtgggaagataattttattcatggatccaaatgtttgttgagtcctttctttgtgctaaggttcttgcggtgaaccagaattataacagtgagctcatctgactgttttaggatgtacagcctagtgttaacattcttggtatctttttgtgccttatctaaaacatttctcgatcactggtttcagatgttcatttattatattcttttcaaagattcagagattggcttttgtcatccactattgtatgttttgtttcattgacctctagtgataccttgatctttcccactttctgttttcggattggagaagatgtaccttttttgtcaactcttacttttatcagatgatcaactcacgtatttggatctttatttgttttctcaaataaatatttaaggttaaaaaaaaaaaaaaaaaaa

SEQ ID NO: 185 - DNA, 2881 bp, Homo sapiens
  ref <308>: DATABASE ACCESSION NUMBER: NM_007210
atgaggctcctccgcagacgccacatgcccctgcgcctggccatggtgggctgcgcctttgtgctcttcctcttcctcctgcatagggatgtgagcagcagagaggaggccacagagaagccgtggctgaagtccctggtgagccggaaggatcacgtcctggacctcatgctggaggccatgaacaaccttagagattcaatgcccaagctccaaatcagggctccagaagcccagcagactctgttctccataaaccagtcctgcctccctgggttctataccccagctgaactgaagcccttctgggaacggccaccacaggaccccaatgcccctggggcagatggaaaagcatttcagaagagcaagtggacccccctggagacccaggaaaaggaagaaggctataagaagcactgtttcaatgcctttgccagcgaccggatctccctgcagaggtccctggggccagacacccgaccacctgagtgtgtggaccagaagttccggcgctgccccccactggccaccaccagcgtgatcattgtgttccacaacgaagcctggtccacactgctgcgaacagtgtacagcgtcctacacaccacccctgccatcttgctcaaggagatcatactggtggatgatgccagcacagaggagcacctaaaggagaagctggagcagtacgtgaagcagctgcaggtggtgagggtggtgcggcaggaggagcggaaggggttgatcaccgcccggctgctgggggccagcgtggcacaggcggaggtgctcacgttcctggatgcccactgtgagtgcttccacggctggctggagcccctcctggctcgaatcgctgaggacaagacagtggtggtgagcccagacatcgtcaccatcgaccttaatacttttgagttcgccaagcccgtccagaggggcagagtccatagccgaggcaactttgactggagcctgaccttcggctgggaaacacttcctccacatgagaagcagaggcgcaaggatgaaacataccccatcaaatccccgacgtttgctggtggcctcttctccatccccaagtcctactttgagcacatcggtacctatgataatcagatggagatctggggaggggagaacgtggaaatgtccttccgggtgtggcagtgtgggggccagctggagatcatcccctgctctgtcgtaggccatgtgttccggaccaagagcccccacaccttccccaagggcactagtgtcattgctcgcaatcaagtgcgcctggcagaggtctggatggacagctacaagaagattttctataggagaaatctgcaggcagcaaagatggcccaagagaaatccttcggtgacatttcggaacgactgcagctgagggaacaactgcactgtcacaacttttcctggtacctgcacaatgtctacccagagatgtttgttcctgacctgacgcccaccttctatggtgccatcaagaacctcggcaccaaccaatgcctggatgtgggtgagaacaaccgcggggggaagcccctcatcatgtactcctgccacggccttggcggcaaccagtactttgagtacacaactcagagggaccttcgccacaacatcgcaaagcagctgtgtctacatgtcagcaagggtgctctgggccttgggagctgtcacttcactggcaagaatagccaggtccccaaggacgaggaatgggaattggcccaggatcagctcatcaggaactcaggatctggtacctgcctgacatcccaggacaaaaagccagccatggccccctgcaatcccagtgacccccatcagttgtggctctttgtctaggacccagatcatccccagagagagcccccacaagctcctcaggaaacaggattgctgatgtctgggaacctgatcaccagcttctctggaggccgtaaagatggatttctaaacccactgggtggcaaggcaggaccttcctaatccttgcaacaacattgggcccattttctttccttcacaccgatggaagagaccattaggacatatatttagcctagcgttttcctgttctagaaatagaggctcccaaagtagggaaggcagctgggggagggttcagggcagcaatgctgagttcaagaaaagtacttcaggctgggcacagtggctcatgcctgaaatcctagcactttgggaagacaatgtgggagaatggcttgagcccaggagttcaagaccggcctgagcaacatagtgaggatcccatctctacgcccaccctccccccggcaaaaaaaaaagctgggtatggtggcttatgcctgtagtcgcagctactcagaaggctgaggtgggaggattgcttgttccccggaggttgaagctacagtgagccttgattgtgtcactgcactccagcctgggcaacaggtaagactctgtctcaaaaaaaaaacaaaaaagaagaagaaaagtacttctacagccatgtcctattccttgatcatccaaagcacctgcagagtccagtgaaatgatatattctggctgggcacagtggctcacacctgtaatcctagcactttgggaggccaaggcaggtggatcacctgaggtcagaagtttgaaaccagcctggactacatggtgaaactccatctctactaaaagtacaaaaattagctgggcatgatggcacgcacctgcagtcccagctacttgggaggctgaggcaggagaatcactcgaacccaggaggcagaggttgcagtgagccaagacagcaccattgcaccccagcctgagcaacaagagcgaaactccatctcaggaaaaaaaaaaaaaaaaa

SEQ ID NO: 186 - DNA, 2119 bp, Homo sapiens
  ref <308>: DATABASE ACCESSION NUMBER: NM_007370
gagttgcttttgcgcgcgaactgtaagtgccagggtctcagggtcaggtcgcggctggtcactgtgcaggcgcttgggtgacgcgacgatctcagcggatctggtcaccttcgtctccccgccatggagacctcagcactcaagcagcaggagcagcccgcggcgaccaagatcaggaacctgccctgggttgaaaaataccggccacagaccctgaatgatctcatttctcatcaggacattctgagtaccattcagaagtttatcaatgaagaccgactgccacacttgcttctctacggtcccccagggacaggcaagacatctaccatcctagcctgtgcgaaacagctatataaagacaaagaatttggctccatggtcttggagctgaatgcttcagatgaccgaggaatagacatcattcgaggaccgatcctgagctttgctagcacaaggacaatatttaagaaaggctttaagctagtgatcttggatgaagcagacgccatgactcaggacgcccagaatgccttgagaagagtaattgagaaattcacagaaaataccagattctgcctcatctgtaactatctgtcaaagatcatccctgccttgcagtcccgctgcacgaggtttcggttcggtcccctgactcctgaactcatggttccccgcctggaacatgtcgtggaagaagagaaagttgatataagtgaagatggaatgaaagcactagtcactctttccagtggagacatgcgtagggctctgaacattttgcagagcaccaatatggcctttgggaaggtgacagaggagactgtctacacctgcaccgggcacccgctcaagtcagacattgccaacatcctggactggatgttgaatcaagatttcaccacagcctacagaaatattacagagttgaaaactctgaaggggttggcactgcatgatatcctgacagagatacacttgtttgtgcatagagttgactttccatcttcagttcgaatacatttattgaccaaaatggcagacattgagtacaggctttctgttggcaccaacgagaagatccagctgagctccctcattgctgcatttcaagtcaccagagacctgattgttgcagaggcctagatgctctgagggccattcacaattctcagggctcagcagtgatgggagaacagaggacagttccaggataaactgctgcctggggctgtgggatgaatcagtcaccccgaatcttggaaaaacccccttccaggagaggatgggcaggcatttaaaaagtaccatttttgtggttgtttggagcagggatgtacaaaataattttaatgtattaactcatactgcctgtcttttataggggaaaaaaataaccttttttattttaaagttataaggtttttaccttttagttgcttggatgacagggaattagcctaccccattttggtctggaacagaagactttcaaatttaatatggtccaagtgtcttcctactcaaggtaaacattatctccaaaattacatttatgattctaatatttggcattgtgtctgtatctaatttaaacagatgttaatggacgtctggccgaaactattatacttttataagatgagctgaatcctcttactttaaaaactggtctttttatttaccctctgtggtagaagagtcaccagcaggttccaaattgatgtgtatgataggaaaaaaaccttaattttaaatataatatagagccttaaactatgccactgggtggcagaggctgtataaaacgcacttgttttcatgcaggagcggggcaagtaaggttgagcctgactgtaaacctagaactgcggaaggactgggacttttgtacaaatttcacatttattttacagcaatcatgctgcatttgtgttagtgttctttataataaaaaacaaagcagcctcctggctggctgtgttacaagtgactcttccttagacagctagaaagatgctgactttgtcaaacttgcatttatatgaaaaccttctgtctctaatatcacagaataaactttctttagatgctgttctttaaaaaaaaaaaaaaaaaa

SEQ ID NO: 187 - DNA, 2385 bp, Homo sapiens
  ref <308>: DATABASE ACCESSION NUMBER: NM_012087
ccacctccctctcatggctagtaggagagactggtgcttgccccgcccggtggactaactcgcttaattttaaataaaaagtcgaggacacggcggtcgttttcccgaagacatgggccctcccatgggccatttgctccctggaggccctcgcgtcttgctgagcccggggagttaggatgacgcgagcggtgagggaacccggaacaattccttcacagaacaattgaggcgaggcctttgggagtactttgtggaacgaaccccggcgggccctgccagacgcacagggatggcggcggaggcggccgatttggggctgggggccgccgtccccgtggagctgaggcgggagcgacgcatggtgtgcgtggagtacccgggagtggtgcgtgatgtggctaagatgctgccgactctgggcggtgaggaaggcgtctcccggatctacgcagaccccaccaagaggctggagctgtacttccggcccaaggacccatactgccacccagtgtgcgccaaccgcttcagtaccagcagcctgctgctccgcatcaggaagagaacgaggcggcagaaaggggtgctgggcactgaggcccactccgaggtcacatttgacatggagatccttggcatcatctccaccatttacaaatttcaggggatgtctgacttccagtacttggctgtgcatacggaagcaggcggcaagcatacgtcaatgtatgacaaggtgctcatgctccggcccgagaaggaggcctttttccaccaggagctgccgctctacatccccccacccatcttctcccggctggacgccccggtggactacttctaccgaccagagacccagcaccgggaaggctacaacaatccccccatctcaggtgagaatctgattggcctgagcagagcccggcgcccccacaatgccatctttgtcaactttgaggatgaggaggtgcccaagcagccactggaggctgcagcccagacgtggaggagagtctgcactaaccccgtggaccggaaggtggaggaggagctgaggaagctgtttgacatccgtcccatctggtcccgaaatgctgtcaaggccaacatcagcgtccacccagacaagctcaaggtcttgcttcccttcatagcctattacatgataacaggcccctggcgcagcctatggattcgatttgggtatgacccccgaaaaaacccagatgccaagatttatcaagtcctcgatttccgaatccgttgtggaatgaaacacggttacgcccccagtgacttgccggtcaaagcaaagcgcagcacctacaactacagcctccccatcaccgtcaagaagacatccagccagcttgtcaccatgcatgacctgaagcagggcctgggccggtcggggacgagtggtgctcggaaaccagcttccagcaagtacaagctcaaggactctgtctacatcttccgggaaggggccttgccaccctatcggcagatgttctaccagttatgcgacttgaatgtggaagagttgcagaagatcattcaccgcaatgacggggcagagaattcctgcacagaacgggatgggtggtgcctccccaagaccagcgacgagctcagggacaccatgtccctcatgatccggcagaccatccgctccaagaggcctgctctcttttccagctcagccaaggctgatggcggaaaagagcagctgacgtacgagtctggggaagacgaggaggatgaggaggaggaggaagaggaggaggaggacttcaagccatccgacggcagtgaaaacgaaatggagacagagattctggactacgtgtgacagggcccaaggctgggcctccctgacccaaccagactggtgtctggcctaatgagggagccttgctccccattgccacccacagtgcccggaatggccctaggaggccctctgaggagagctagagtcccagcaaagggtgcagctgaccctagcactggctgtgacatgctgcttggtgctgcctctggtcctgaggggttagggacatcccaaaggtataccctgctctgccacccatgaaccagcccagcatccagccagtgagtggcacccaatgcctctcaggatgagaccagtaaatgccggaggtggagctgggcagctgtggagccccacgcacaggccagtctcgcttggctctcatgactgtggtggtggagatagcgtggggagcctcgcccatggtctcacgtggcaagaagtgcctttagctctggatcccaaccgtttggcacagctttgccacagccaggcccctctggaattgtccttattaaaccagtttcccgaaaaaaaaaaaaaaaaaaaaa

SEQ ID NO: 188 - DNA, 1375 bp, Homo sapiens
  ref <308>: DATABASE ACCESSION NUMBER: NM_012111
aaaagcaagccaggaggtgcttgcggccgcttctagtagtttccaggcgctgccgggcggctggcactaagcggtcctgaggctgtggctacggctgctccggagctggtggcgccgcgataggagagccgatggccaagtggggtgagggagacccacgctggatcgtggaggagcgggcggacgccaccaacgtcaacaactggcactggacggagagagatgcttcaaattggtccacggataagctgaaaacactgttcttggcagtgcaggttcaaaatgaagaaggcaagtgtgaggtgacggaagtgagtaagcttgatggagaggcatccattaacaatcgcaaagggaaacttatcttcttttatgaatggagcgtcaaactaaactggacaggtacttctaagtcaggagtacagtacaaaggacatgtggagatccccaatttgtctgatgaaaacagcgtggatgaagtggagattagtgtgagccttgccaaagatgagcctgacacaaatctcgtggccttaatgaaggaagaaggggtgaaacttctaagagaagcaatgggaatttacatcagcaccctcaaaacagagttcacccagggcatgatcttacctacaatgaatggagagtcagtagacccagtggggcagccagcactgaaaactgaggagcgcaaggctaagcctgctccttcaaaaacccaggccagacctgttggagtcaaaatccccacttgtaagatcactcttaaggaaaccttcctgacgtcaccagaggagctctatagagtgtttaccacccaagagctggtgcaggcctttacccatgctcctgcaacattagaagcagacagaggtggaaagttccacatggtagatggcaacgtctctggggaatttactgatctggtccctgagaaacatattgtgatgaagtggaggtttaaatcttggccagagggacactttgccaccatcaccttgaccttcatcgacaagaacggagagactgagctgtgcatggaaggtcgaggcatccctgctcctgaggaagagcggacacgacagggctggcagcggtactactttgagggcattaaacagacctttggctatggcgcacgcttattttagggccagcggcaggggactccagcctgctggacacttcagtccagctctctcctgactggggcttgcgactcacaggattgcatcgtcccagctgctaacttggggccggggcccctcccttccacatataccttgggtttgtgcatgttttctgctgggtgggttcagagggcaatttctcttttatgtgtacatatgctaaataaacataatttaaaaaacaaaaa

SEQ ID NO: 189 - DNA, 6552 bp, Homo sapiens
  ref <308>: DATABASE ACCESSION NUMBER: NM_012291
atgaggagcttcaaaagagtcaactttgggactctgctaagcagccagaaggaggctgaagagttgctgcccgacttgaaggagttcctgtccaaccctccagctggttttcccagcagccgatctgatgctgagaggagacaagcttgtgatgccatcctgagggcttgcaaccagcagctgactgctaagctagcttgccctaggcatctggggagcctgctggagctggcagagctggcctgtgatggctacttagtgtctaccccacagcgtcctcccctctacctggaacgaattctctttgtcttactgcggaatgctgctgcacaaggaagcccagaggccacactccgccttgctcagcccctccatgcctgcttggtgcagtgctctcgcgaggctgctccccaggactatgaggccgtggctcggggcagcttttctctgctttggaagggggcagaagccctgttggaacggcgagctgcatttgcagctcggctgaaggccttgagcttcctagtactcttggaggatgaaagtaccccttgtgaggttcctcactttgcttctccaacagcctgtcgagcggtagctgcccatcagctatttgatgccagtggccatggtctaaatgaagcagatgctgatttcctagatgacctgctctccaggcacgtgatcagagccttggtgggtgagagagggagctcttctgggcttctttctccccagagggccctctgcctcttggagctcaccttggaacactgccgtcgcttttgctggagccgccaccatgacaaagccatcagcgcagtggagaaggctcacagttacctaaggaacaccaatctagcccctagccttcagctatgtcagctgggggttaagctgctgcaggttggggaggaaggacctcaggcagtggccaagcttctgatcaaggcatcagctgtcctgagcaagagtatggaggcaccatcacccccacttcgggcattgtatgagagctgccagttcttcctttcaggcctggaacgaggcaccaagaggcgctatagacttgatgccattctgagcctctttgcttttcttggagggtactgctctcttctgcagcagctgcgggatgatggtgtgtatgggggctcctccaagcaacagcagtcttttcttcagatgtactttcagggacttcacctctacactgtggtggtttatgactttgcccaaggctgtcagatagttgatttggctgacctgacccaactagtggacagttgtaaatctaccgttgtctggatgctggaggccttagagggcctgtcgggccaagagctgacggaccacatggggatgaccgcttcttacaccagtaatttggcctacagcttctatagtcacaagctctatgccgaggcctgtgccatctctgagccgctctgtcagcacctgggtttggtgaagccaggcacttatcccgaggtgcctcctgagaagttgcacaggtgcttccggctacaagtagagagtttgaagaaactgggtaaacaggcccagggctgcaagatggtgattttgtggctggcagccctgcaaccctgtagccctgaacacatggctgagccagtcactttctgggttcgggtcaagatggatgcggccagggctggagacaaggagctacagctaaagactctgcgagacagcctcagtggctgggacccggagaccctggccctcctgctgagggaggagctgcaggcctacaaggcggtgcgggccgacactggacaggaacgcttcaacatcatctgtgacctcctggagctgagccccgaggagacaccagccggggcctgggcacgagccacccacctggtagaactggctcaggtgctctgctaccacgactttacgcagcagaccaactgctctgctctggatgctatccgggaagccctgcagcttctggactctgtgaggcctgaggcccaggccagagatcagcttctggacgataaagcacaggccttgctgtggctttacatctgtactctggaagccaaaatacaggaaggtatcgagcgggatcggagagcccaggcccctggtaacttggaggaatttgaagtcaatgacctgaactatgaagataaactccaggaagatcgtttcctatacagtaacattgccttcaacctggctgcagatgctgctcagtccaaatgcctggaccaagccctggccctgtggaaggagctgcttacaaaggggcaggccccagctgtacggtgtctccagcagacagcagcctcactgcagatcctagcagccctctaccagctggtggcaaagcccatgcaggctctggaggtcctcctgctgctacggattgtctctgagagactgaaggaccactcgaaggcagctggctcctcctgccacatcacccagctcctcctgaccctcggctgtcccagctatgcccagttacacctggaagaggcagcatcgagcctgaagcatctcgatcagactactgacacatacctgctcctttccctgacctgtgatctgcttcgaagtcaactctactggactcaccagaaggtgaccaagggtgtctctctgctgctgtctgtgcttcgggatcctgccctccagaagtcctccaaggcttggtacttgctgcgtgtccaggtcctgcagctggtggcagcttaccttagcctcccgtcaaacaacctctcacactccctgtgggagcagctctgtgcccaaggctggcagacacctgagatagctctcatagactcccataagctcctccgaagcatcatcctcctgctgatgggcagtgacattctctcaactcagaaagcagctgtggagacatcgtttttggactatggtgaaaatctggtacaaaaatggcaggttctttcagaggtgctgagctgctcagagaagctggtctgccacctgggccgcctgggtagtgtgagtgaagccaaggccttttgcttggaggccctaaaacttacaacaaagctgcagataccacgccagtgtgccctgttcctggtgctgaagggcgagctggagctggcccgcaatgacattgatctctgtcagtcggacctgcagcaggttctgttcttgcttgagtcttgcacagagtttggtggggtgactcagcacctggactctgtgaagaaggtccacctgcagaaggggaagcagcaggcccaggtcccctgtcctccacagctcccagaggaggagctcttcctaagaggccctgctctagagctggtggccactgtggccaaggagcctggccccatagcaccttctacaaactcctccccagtcttgaaaaccaagccccagcccatacccaacttcctgtcccattcacccacctgtgactgctcgctctgcgccagccctgtcctcacagcagtctgtctgcgctgggtattggtcacggcaggggtgaggctggccatgggccaccaagcccagggtctggatctgctgcaggtcgtgctgaagggctgtcctgaagccgctgagcgcctcacccaagctctccaagcttccctgaatcataaaacacccccctccttggttccaagcctcttggatgagatcttggctcaagcatacacactgttggcactggagggcctgaaccagccatcaaacgagagcctgcagaaggttctacagtcagggctgaagtttgtagcagcacggataccccacctagagccctggcgagccagcctgctcttgatttgggccctcacaaaactaggtggcctcagctgctgtactacccaactttttgcaagctcctggggctggcagccaccattaataaaaagtgtccctggctcagagccctctaagactcagggccaaaaacgttctggacgagggcgccaaaagttagcctctgctcccctgcgcctcaataatacctctcagaaaggtctggaaggtagaggactgccctgcacacctaaacccccagaccggatcaggcaagctggccctcatgtccccttcacggtgtttgaggaagtctgccctacagagagcaagcctgaagtaccccaggcccccagggtacaacagagagtccagacgcgcctcaaggtgaacttcagtgatgacagtgacttggaagaccctgtctcagctgaggcctggctggcagaggagcctaagagacggggcactgcttcccggggccgggggcgagcaaggaagggcctgagcctaaagacggatgccgtggttgccccaggtagtgcccctgggaaccctggcctgaatggcaggagccggagggccaagaaggtggcatcaagacattgtgaggagcggcgtccccagagggccagtgaccaggccaggcctggccctgagatcatgaggaccatccctgaggaagaactgactgacaactggagaaaaatgagctttgagatcctcaggggctctgacggggaagactcagcctcaggtgggaagactccagctccgggccctgaggcagcttctggagaatgggagctgctgaggctggattccagcaagaagaagctgcccagcccatgcccagacaaggagagtgacaaggaccttggtcctcggctccagctcccctcagcccccgtagccactggtctttctaccctggactccatctgtgactccctgagtgttgctttccggggcattagtcactgtcctcctagtgggctctatgcccacctctgccgcttcctggccttgtgcctgggccaccgggatccttatgccactgctttccttgtcaccgagtctgtctccatcacctgtcgccaccagctgctcacccacctccacagacagctcagcaaggcccagaagcaccgaggatcacttgaaatagcagaccagctgcaggggctgagccttcaggagatgcctggagatgtccccctggcccgcatccagcgcctcttttccttcagggctttggaatctggccacttcccccagcctgaaaaggagagtttccaggagcgcctggctctgatccccagtggggtgactgtgtgtgtgttggccctggccaccctccagcccggaaccgtgggcaacaccctcctgctgacccggctggaaaaggacagtcccccagtcagtgtgcagattcccactggccagaacaagcttcatctgcgttcagtcctgaatgagtttgatgccatccagaaggcacagaaagagaacagcagctgtactgacaagcgagaatggtggacagggcggctggcactggaccacaggatggaggttctcatcgcttccctagagaagtctgtgctgggctgctggaaggggctgctgctgccgtccagtgaggagcccggccctgcccaggaggcctcccgcctacaggagctgctacaggactgtggctggaaatatcctgaccgcactctgctgaaaatcatgctcagtggtgccggtgccctcacccctcaggacattcaggccctggcctacgggctgtgcccaacccagccagagcgagcccaggagctcctgaatgaggcagtaggacgtctacagggcctgacagtaccaagcaatagccaccttgtcttggtcctagacaaggacttgcagaagctgccgtgggaaagcatgcccagcctccaagcactgcctgtcacccggctgccctccttccgcttcctactcagctactccatcatcaaagagtatggggcctcgccagtgctgagtcaaggggtggatccacgaagtaccttctatgtcctgaaccctcacaataacctgtcaagcacagaggagcaatttcgagccaatttcagcagtgaagctggctggagaggagtggttggggaggtgccaagacctgaacaggtgcaggaagccctgacaaagcatgatttgtatatctatgcagggcatggggctggtgcccgcttccttgatgggcaggctgtcctgcggctgagctgtcgggcagtggccctgctgtttggctgtagcagtgcggccctggctgtgcatggaaacctggagggggctggcatcgtgctcaagtacatcatggctggttgccccttgtttctgggtaatctctgggatgtgactgaccgcgacattgaccgctacacggaagctctgctgcaaggctggcttggagcaggcccaggggccccccttctctactatgtaaaccaggcccgccaagctccccgactcaagtatcttattggggctgcacctatagcctatggcttgcctgtctctctgcggtaaccccatggagctgtcttattgatgctagaagcctcataactgttctacctccaaggttagatttaatccttaggataactcttttaaagtgattttccccagtgttttatatgaaacatttccttttgatttaacctcagtataataaagatacatcatttaaaccctgaaaaaaaaaaaaaaaaaaaa

SEQ ID NO: 190 - DNA, 4348 bp, Homo sapiens
  ref <308>: DATABASE ACCESSION NUMBER: NM_012310
gggaggcccagggagaacggggaagggacatttagtttgagacggtgctgagataggatcatgaaggaagaggtgaagggaattcctgtaagagtggcgctgcgttgtcgccctctggtccccaaagagattagcgagggctgccagatgtgcctttccttcgtgcccggagagcctcaggtggtggttggtacagataaatccttcacctacgattttgtatttgatccctctactgaacaggaagaagtcttcaatacagcagtagcgccactcataaaaggtgtatttaaaggatataatgcaacggtcctggcctatgggcagactggctctggaaaaacctattcaatgggaggtgcatatactgcagagcaagagaatgaaccaacagttggggttattcctagggtaatacaactgctcttcaaagaaattgataaaaagagtgactttgaatttactctgaaagtgtcttacttagagatttacaatgaagaaattttggatcttctatgtccatctcgtgagaaagctcaaataaatatacgagaggatcctaaggaaggcataaagattgtgggactcactgagaagactgttttggttgccttggatactgtttcctgtttggaacagggcaacaactctaggactgtggcctccacggctatgaactcccagtcgtcccgatctcatgccatctttacaatctccttagagcaaggaaagaaaagtgacaagaatagcagctttcgctccaagctgcatcttgtagacctcgctggatcagaaagacagaagaaaaccaaggctgaaggggatcgtctaaaagagggtattaatattaaccgaggcctcctatgcttgggaaatgtaatcagtgctcttggagatgacaaaaagggtggctttgcgccctacagagattccaagttgactcgactgcttcaagattctctaggaggtaatagccatactcttatgatagcctgtgtgagtcctgctgactccaatctagaggaaacattaaatacccttcgctatgctgacagagcaagaaaaatcaagaacaaacctattgttaatattgatccccagacagctgaacttaatcatctaaagcaacaggtacaacagctacaagtcttgttgctacaggcccatggaggtaccctgcctggatctataactgtggaaccatcagagaatctacaatccctgatggagaagaatcagtccctggtagaggagaatgaaaaattaagtcgtggtctgagcgaggcagctggtcagacagcccagatgttggagaggatcatttggacagagcaagcgaatgaaaaaatgaacgccaagctagaagagctcaggcagcatgcggcctgcaaactggatcttcaaaagctagtggagactttggaagaccaggaattgaaagaaaatgtagagataatttgtaacctgcagcaattgattacccagttatcggatgaaactgttgcttgcatggctgcagccattgatactgcggtggagcaagaagcccaagtagaaaccagtccagagacgagcaggtcttctgacgcttttaccactcagcatgctctccgtcaagcgcagatgtctaaggagctggttgagttgaataaagcgcttgcactgaaagaggccctggctaggaagatgactcagaatgacagccaactgcagcctattcagtaccaataccaggataacataaaagagccagaattagaagtcatcaatctgcaaaaggaaaaggaagaattggttcttgaacttcagacagcaaagaaggatgccaaccaagccaagttgagtgagcgccgccgcaaacgtctccaggagctggagggtcaaattgctgatctgaagaagaaactgaatgagcagtccaaacttctgaaactaaaggaatccacagagcgtactgtctccaaactgaaccaggagatacggatgatgaaaaaccagcgggtacagttaatgcgtcaaatgaaagaagatgctgagaagtttagacagtggaagcagaaaagagacaaagaagtaatacagttaaaagaacgagaccgtaagaggcaatatgagctgctgaaacttgaaagaaacttccagaaacaatccaatgtgctcagacgtaaaacggaggaggcagcagctgccaacaagcgtctcaaggatgctctccagaaacaacgggaggttgcagataagcggaaagagactcagagccgtggaatggaaggcactgcagctcgagtgaagaattggcttggaaacgaaattgaggttatggtcagtactgaggaagccaaacgccatctgaatgacctccttgaagatagaaagatcctggctcaagatgtggctcaactcaaagaaaaaaaggaatctggggagaatccacctcctaaactccggaggcgtacattctcccttactgaagtgcgtggtcaagtttcggagtcagaagattctattacaaagcagattgaaagcctagagactgaaatggaattcaggagtgctcagattgctgacctacagcagaagctgctggatgcagaaagtgaagacagaccaaaacaacgctgggagaatattgccaccattctggaagccaagtgtgccctgaaatatttgattggagagctggtctcctccaaaatacaggtcagcaaacttgaaagcagcctgaaacagagcaagaccagctgtgctgacatgcagaagatgctgtttgaggaacgaaatcattttgccgagatagagacagagttacaagctgagctggtcagaatggagcaacagcaccaagagaaggtgctgtaccttctcagccagctgcagcaaagccaaatggcagagaagcagttagaggaatcagtcagtgaaaaggaacagcagctgctgagcacactgaagtgtcaggatgaagaacttgagaaaatgcgagaagtgtgtgagcaaaatcagcagcttctccgagagaatgaaatcatcaagcagaaactgaccctcctccaggtagccagcagacagaaacatcttcctaaggatacccttctatctccagactcttcttttgaatatgtccagcctaagccaaaaccttctcgtgttaaagaaaagttcctggagcaaagcatggacatcgaggatctaaaatattgttcagagcattctgtgaatgagcatgaggatggtgatggtgatgatgatgagggggatgacgaggaatggaagccaacaaaattagttaatgtgtccaggaagaacatccaagggtgttcctgcaagggctggtgtggaaacaagcaatgtgggtgcaggaagcaaaagtcagactgtggtgtggactgttgctgtgaccccacaaagtgtcggaaccgccagcaaggcaaggatagcttgggcactgttgaacggacccaggattcagaaagctccttcaaactggaggatcctaccgaggtgaccccaggattgagcttctttaatcccgtctgtgccacccccaatagcaagatcctgaaagagatgtgcgatgtggagcaggtgctgtcaaagaagactcccccagctccctccccttttgacctcccagagttgaaacatgtagcaacagaataccaagaaaacaaggctccagggaagaaaaagaaacgggctctggccagcaacaccagcttcttctctggctgctcccctatcgaagaagaggcccactgaagttggagtcatcatctctacccccagtctggcttgggagatgctttcaggttgcagccagaaggggttttttaaatgacttctctggatttcaggtttcttgctgttgaaaaaaggaacaaagcgttactgaaaagaaggtaacctttgttggatgtgggccttagcctccaggtccagactactactctatgttctccagaagggtgctaagtcacctactgaagagagaaccaactgactttcctattgactcatcaggaaccagtcctcagtctggtcaagttgtttcttatttgtgagcagttcaggctatctcctgatggggatgaggccaaggctttcttatcttttggttgtctctgcttaatggaggagcctggcctaggatggaggcctggcttagatctttcattccacctcaggaatgaggttgtgatctttcctgtcctgaccctctctgaattatgtttcaatagtactcttgattgtctgccatgttgttgaagcaaatgaattatttttaaatgttaagtaagtaaataaaccttagcccgtctttttttttttttttttttttttttttttt

SEQ ID NO: 191 - DNA, 644 bp, Homo sapiens
  ref <308>: DATABASE ACCESSION NUMBER: NM_012394
gctccctggggaacccagcaggcggcgaagatggcggagaacagcggtcgcgccggcaagagcagcgggagcggcgcggggaagggggcggtgtccgcagagcaggtgattgctggcttcaaccgccttcggcaggaacagcgaggcctggcatccaaagcagctgagttggagatggagttgaatgagcacagcctagtgatcgatacactgaaggaggtagatgaaactcgtaagtgctaccgcatggttggaggagtgctggtggagcgaactgtcaaagaggtgctgcccgctttggagaacaacaaggagcagatacagaagatcattgagacactgacacagcagcttcaggcaaagggaaaagaactaaatgaattccgggaaaagcacaacattcgtctcatgggagaagatgagaagccagcagccaaggaaaactcagaaggggctggggctaaggccagctcagctggagtgttggtctcctagggaccaaggcctttgcatttttttctaccctgactcccacttctaatttctctttattgttattattattattttctctgctattgtaatatttttttgttaattaaatgttttggtcagaatcttaaaaaaaaaaaaaaaaaaaaaaa

SEQ ID NO: 192 - DNA, 847 bp, Homo sapiens
  ref <308>: DATABASE ACCESSION NUMBER: NM_012412
tggggttcgaaccagcaagacaagcgggcattggccacagcagcgcgaggcgggcacggggtattgtccggctccggcggcggcggtcggtgctgcgagagcggcggcggcggcgcgggtcggcagcgggagggcgcgcggccgagcggaggcggagtcggcgccgagaacatggctggaggcaaagctggaaaggacagtgggaaggccaaggctaaggcagtatctcgctcacagagagctgggctacagtttcctgtgggccgcatccacagacacttgaagactcgcaccacaagccatggaagggtgggtgccactgctgccgtgtacagtgctgcgattctggagtacctcactgcagaggtgctggagctggcaggtaatgcttctaaggatctcaaagtaaagcgtatcactccgcgtcacttgcagcttgcaatccgtggtgatgaagagttggattctcttatcaaggctaccatagctgggggtggtgtgatccctcacatccacaaatctctgattggaaagaagggacagcagaaaactgcttagagggatgctttaaccaaccctcttcctccccgtcattgtactgtaactgggacagaagaaataatggggatatgtggaatttttaacaacagttaaatggaaaagcatagacaattactgtagacatgataaaagaaacatttgtatgttcttagactcgaagtttgataaaagtaccttttcatgtggtgacagttgtgtgttgattggctaggtttctcccgtgtgttttatacaaaaatggaattgataaaccattttttacaaaattaaaaaaaaaaaaaaaaaa

SEQ ID NO: 193 - DNA, 2908 bp, Homo sapiens
  ref <308>: DATABASE ACCESSION NUMBER: NM_012450
tgctttgcaggcccaggctcaaggcaaattataagtagggaaccaatttgagggaaagacatgtgaacagagttaaggtaccacgtcctgggagcgaccagcagccccacctgaagtccgcatgcaactctgacaagctcaggtgcttgttttaaggaaaggggctactagagtcttaccaacagcgagcccaggtgggagatgaaacaggtactccccaaaataggtcatccgagggaggaaaactgatggagagcacaatgtgctctgagcgtttttaatgtttttaagcttttaaatgatttcttcaaggccgagcagcagcagcaaaggtgtggcttaaaggattaagggggtttctgctgacacctagaatgaagttactctattactaatcaagccgagaggaggcccactatgcccccgtttatcatcctttcccagttcctttttgctggtcacaaaacgatgctcatcaatcccacctaaagcaggaggccaggagcccagcctcttgtagaaacagcgagggtataactgccctcccgttctgcccccaagacgaaggaggactctcggaagccaagaaaggtttaagaagtctttctggatagagagcagtgcccaggcaggaagcctttcgccggcagagcggggtccaaggacgagctggagaggacagaggcgcgatgggcctgctgcagggcctgctccgagtccggaagctgctgctggtcgtctgcgtcccgctcctgctgctgcctctgcccgtcctccaccccagcagcgaggcctcgtgtgcttacgtgctgatcgtgactgctgtgtactgggtgtcggaggcagtgcctctgggagctgcagccctggtgccggccttcctttacccgttcttcggagtcctccggtccaatgaggtggcggcggagtacttcaagaacaccacgctgctgctggtgggggtcatctgcgtggcggctgccgtggagaagtggaacctgcataagcgcattgctctgcgcatggtcttgatggccggagccaagccgggcatgctgctgctctgcttcatgtgctgtaccacgttgctgtccatgtggctgtccaacacctccaccaccgccatggtgatgcccatcgtggaggccgtgctgcaggagctggtcagtgctgaggacgagcagctcgtggcgggcaactccaacaccgaagaggccgaacccatcagtctggatgtaaagaacagccaaccttctctggaactcatctttgtcaatgaagagtccaacgcagacctcaccactctgatgcacaacgagaacctgaatggtgtgccctcgatcaccaaccccatcaaaactgcaaaccaacaccagggcaagaagcaacacccatcccaggaaaagccacaagtcctgacccccagccccaggaagcagaagctgaacagaaagtacaggtcccaccatgaccagatgatctgcaagtgcctctccctgagcatatcctactccgctaccattggcggcctgaccaccatcatcggcacctccaccagcctcatcttcctggaacacttcaacaaccagtatccagccgcagaggtggtgaactttggcacctggttcctcttcagcttccccatatccctcatcatgctggtggtcagctggttctggatgcactggctgttcctgggctgcaattttaaagagacctgctctctgagcaagaagaagaagaccaaaagggaacagttgtcagagaagaggatccaagaagaatatgaaaaactgggagacattagctacccagaaatggtgactggatttttcttcatcctgatgaccgtactgtggtttacccgggagcctggctttgtccctggctgggattctttctttgaaaagaaaggctaccgtactgatgccacagtctctgtcttccttggcttcctcctcttcctcattccagcgaagaagccctgctttgggaaaaagaatgatggagagaaccaggagcactcactggggaccgagcccatcatcacgtggaaggacttccagaagaccatgccctgggagattgtcattctggttgggggaggctatgctctggcttctggtagcaagagctctggcctctctacatggattgggaaccagatgttgtccctgagcagcctcccaccgtgggctgtcaccctgctggcatgcatcctcgtgtccattgtcactgagtttgtgagcaacccagcaaccatcaccatcttcctgcccatcctgtgcagcctgtctgaaacgctgcacattaaccccctctacaccctgatcccagtcaccatgtgcatctcctttgcagtgatgctgcctgtgggcaatccccctaatgccatcgtcttcagctatgggcactgccagatcaaagatatggtgaaagctggcctgggagtcaacgttattggactggtgatagtaatggtggccatcaacacctggggagttagcctcttccacctggacacttacccagcatgggcgagggtcagcaacatcactgatcaagcctaacgccaagtgtacaaactggcccaaccacaggagctgccagtatccagcagtatctggaccacaggcaaagaaaaccactaggaccaccaggagcacacaaccccagacccacgccggagggcatccctccaccagaagattccgccacctcaagtgaactgcaggaatcctccaacaaccacaaacacatgcttcgctgttagtgtcttcttcctgccctcagcaccacagctcaagaaaacctaaagtttcaatacaagccataggctcacagaaaaagaaaaagaaaataaaaattaaattaaaaaaaaagaagacaaagaaaaaaaaaaaaaaaa

SEQ ID NO: 194 - DNA, 2333 bp, Homo sapiens
  ref <308>: DATABASE ACCESSION NUMBER: NM_012453
gggccaggccgcgcccccgcgtgcgtgcgcggcccggcagagccgtgcgggcgcccgcgtactcactagctgaggtggcagtggttccaccaacatggagctctcgcagatgtcggagctcatggggctgtcggtgttgcttgggctgctggccctgatggcgacggcggcggtagcgcgggggtggctgcgcgcgggggaggagaggagcggccggcccgcctgccaaaaagcaaatggatttccacctgacaaatcttcgggatccaagaagcagaaacaatatcagcggattcggaaggagaagcctcaacaacacaacttcacccaccgcctcctggctgcagctctgaagagccacagcgggaacatatcttgcatggactttagcagcaatggcaaatacctggctacctgtgcagatgatcgcaccatccgcatctggagcaccaaggacttcctgcagcgagagcaccgcagcatgagagccaacgtggagctggaccacgccaccctggtgcgcttcagccctgactgcagagccttcatcgtctggctggccaacggggacaccctccgtgtcttcaagatgaccaagcgggaggatgggggctacaccttcacagccaccccagaggacttccctaaaaagcacaaggcgcctgtcatcgacattggcattgctaacacagggaagtttatcatgactgcctccagtgacaccactgtcctcatctggagcctgaagggtcaagtgctgtctaccatcaacaccaaccagatgaacaacacacacgctgctgtatctccctgtggcagatttgtagcctcgtgtggcttcaccccagatgtgaaggtttgggaagtctgctttggaaagaagggggagttccaggaggtggtgcgagccttcgaactaaagggccactccgcggctgtgcactcgtttgctttctccaacgactcacggaggatggcttctgtctccaaggatggtacatggaaactgtgggacacagatgtggaatacaagaagaagcaggacccctacttgctgaagacaggccgctttgaagaggcggcgggtgccgcgccgtgccgcctggccctctcccccaacgcccaggtcttggccttggccagtggcagtagtattcatctctacaatacccggcggggcgagaaggaggagtgctttgagcgggtccatggcgagtgtatcgccaacttgtcctttgacatcactggccgctttctggcctcctgtggggaccgggcggtgcggctgtttcacaacactcctggccaccgagccatggtggaggagatgcagggccacctgaagcgggcctccaacgagagcacccgccagaggctgcagcagcagctgacccaggcccaagagaccctgaagagcctgggtgccctgaagaagtgactctgggagggcccggcgcagaggattgaggaggagggatctggcctcctcatggcgctgctgccatctttcctcccaggtggaagcctttcagaaggagtctcctggttttcttactggtggccctgcttcttcccattgaaactactcttgtctacttaggtctctctcttcttgctggctgtgactcctccctgactagtggccaaggtgcttttcttcctcccaggcccagtgggtggaatctgtccccacctggcactgaggagaatggtagagaggagaggagagagagagagaatgtgatttttggccttgtggcagcacatcctcacacccaaagaagtttgtaaatgttccagaacaacctagagaacacctgagtactaagcagcagttttgcaaggatgggagactgggatagcttcccatcacagaactgtgttccatcaaaaagacactaagggatttccttctgggcctcagttctatttgtaagatggagaataatcctctctgtgaactccttgcaaagatgatatgaggctaagagaatatcaagtccccaggtctggaagaaaagtagaaaagagtagtactattgtccaatgtcatgaaagtggtaaaagtgggaaccagtgtgctttgaaaccaaattagaaacacattccttgggaaggcaaagttttctgggacttgatcatacattttatatggttgggacttctctcttcgggagatgatatcttgtttaaggagacctcttttcagttcatcaagttcatcagatatttgagtgcccactctgtgcccaaataaatatgagctggggattaaaaaaaaaaaaaaaaaaaaaaaaaaaaaaaaaaaaaaaaaaaaaaaaaaaaaaaaaaaa

SEQ ID NO: 195 - DNA, 6654 bp, Homo sapiens
  ref <308>: DATABASE ACCESSION NUMBER: NM_012464
ctcacacttttgctctcttgcagtcagttgctttgctggcttctgcaggcttttaaggtctcgcggcgtagaaatgcctggcccccacccccttcctcggtctcccctttcaattcagatgtgctgatgtgcagaccggattcatcttctcggagctgcggcggcggctttgggctcaggcggcggcggctcgcgctcggccgcggagtcctggcagcagcggggacgcggcgcgggagtccgagctctggtggcagctgagcccgcggggcgccgctcgccgagccgcggccgcgggaagttcggcagccagaaggacgacctggcaggctgcgagcgccagcgccgccagagccgagtttgcctgcgccctccccgcctccgagtgcagagttccttacctgccctccgcccacccgtgggcccctagccaacttctccctgcgactgggggtaacaggcagtgcttgccctctctactgtcccggcggcatccacatgtttccggacacctgagcaccccggtcccgccgaggagcctccgggtggggagaagagcaccggtgcccctagccccgcacatcagcgcggaccgcggctgcctaacctctgggtcccgtcccctccttttcctccgggggaggaggatggggttgggaacgctttccccgaggatgctcgtgtggctggtggcctcggggattgttttctacggggagctatgggtctgcgctggcctcgattatgattacacttttgatgggaacgaagaggataaaacagagactatagattacaaggacccgtgtaaagccgctgtattttggggcgatattgccttagatgatgaagacttaaatatctttcaaatagataggacaattgaccttacgcagaacccctttggaaaccttggacataccacaggtggacttggagaccatgctatgtcaaagaagcgaggggccctctaccaacttatagacaggataagaagaattggctttggcttggagcaaaacaacacagttaagggaaaagtacctctacaattctcagggcaaaatgagaaaaatcgagttcccagagccgctacatcaagaacggaaagaatatggcctggaggcgttattccttatgttataggaggaaacttcactggcagccagagagccatgttcaagcaggccatgaggcactgggaaaagcacacatgtgtgactttcatagaaagaagtgatgaagagagttacattgtattcacctataggccttgtggatgctgctcctatgtaggtcggcgaggaaatggacctcaggcaatctctatcggcaagaactgtgataaatttgggattgttgttcatgaattgggtcatgtgataggcttttggcatgaacacacaagaccagatcgagataaccacgtaactatcataagagaaaacatccagccaggtcaagagtacaattttctgaagatggagcctggagaagtaaactcacttggagaaagatatgatttcgacagtatcatgcactatgccaggaacaccttctcaagggggatgtttctggataccattctcccctcccgtgatgataatggcatacgtcctgcaattggtcagcgaacccgtctaagcaaaggagatatcgcacaggcaagaaagctgtatagatgtccagcatgtggagaaactctacaagaatccaatggcaacctttcctctccaggatttcccaatggctacccttcttacacacactgcatctggagagtttctgtgaccccaggggagaagattgttttaaattttacaacgatggatctatacaagagtagtttgtgctggtatgactatattgaagtaagagacgggtactggagaaaatcacctctccttggtagattctgtggggacaaattgcctgaagttcttacttctacagacagcagaatgtggattgagtttcgtagcagcagtaattgggtaggaaaaggctttgcagctgtctatgaagcgatctgtggaggtgagatacgtaaaaatgaaggacagattcagtctcccaattatcctgatgactatcgcccgatgaaagaatgtgtgtggaaaataacagtgtctgagagctaccacgtcgggctgacctttcagtcctttgagattgaaagacatgacaattgtgcttatgactacctggaagttagagatggaaccagtgaaaatagccctttgatagggcgtttctgtggttatgacaaacctgaagacataagatctacctccaatactttgtggatgaagtttgtttctgacggaactgtgaacaaagcagggtttgctgctaacttttttaaagaggaagatgagtgtgccaaacctgaccgtggaggctgtgagcagcgatgtctgaacactctgggcagttaccagtgtgcctgtgagcctggctatgagctgggcccagacagaaggagctgtgaagctgcttgtggtggacttcttaccaaacttaacggcaccataaccacccctggctggcccaaggagtaccctcctaataagaactgtgtgtggcaagtggttgcaccaacccagtacagaatttctgtgaagtttgagttttttgaattggaaggcaatgaagtttgcaaatatgattatgtggagatctggagtggtctttcctctgagtctaaactgcatggcaaattctgtggcgctgaagtgcctgaagtgatcacatcccagttcaacaatatgagaattgaattcaaatctgacaatactgtatccaagaagggcttcaaagcacattttttctcagacaaagatgaatgctctaaggataatggtggatgtcagcacgaatgtgtcaacacgatggggagctacatgtgtcaatgccgtaatggatttgtgctacatgacaataaacatgattgcaaggaagctgagtgtgaacagaagatccacagtccaagtggcctcatcaccagtcccaactggccagacaagtacccaagcaggaaagaatgcacttgggaaatcagcgccactcctggccaccgaatcaaattagcctttagtgaatttgagattgagcagcatcaagaatgtgcttatgaccacttagaagtatttgatggagaaacagaaaagtcaccgattcttggacgactgtgtggcaacaagataccagatccccttgtggctactggaaataaaatgtttgttcggtttgtttctgatgcatctgttcaaagaaaaggctttcaagctacacattctacagagtgtggcggacgattgaaagcagaatcaaaaccaagagatctgtactcacatgctcagtttggtgataacaactacccaggacaggttgactgtgaatggctattagtatcagaacggggctctcgacttgaattatccttccagacatttgaagtggaggaagaagcagactgtggctatgactatgtggagctctttgatggtcttgattcaacagctgtggggcttggtcgattctgtggatccgggccaccagaagagatttattcaattggagattcagttttaattcatttccacactgatgacacaatcaacaagaagggatttcatataagatacaaaagcataagatatccagataccacacataccaaaaaataacaccaaaacctctgtcagaacacaaaggaatgtgcataatggagagaagacatattttttttaaaactgaagatattggcacaaatgttttatacaaagagtttgaacaaaaaatccctgtaagaccagaattatctttgtactaaaagagaagtttccagcaaaaccctcatcagcattacaaggatatttgaactccatgcttgatggtattaataaagctggtgaaagggcatcatatacttcaaggaagactctacaagcttttgttcacagcttgaaatagatgcctcacaattcagacagtttaattcaggaactgtgaccctgcagtgttctttttgacaatttgtcaagatttagggacataaaatgatcttgcaggtcgtaaactggaaaacagtattttggttgtcttaggataattgctgactttgtatcttggatacagtgtaaaccagatccatataaggtgaatgtgaaatgggagtcttctgagggtgatttgtactttccatgtgtatgtgtgtgtctggtgtttggaaactgggatatttcagcttcattatttccacttgcaggccagcttaacctctgaaacacaaatgatcttgagaccactttagtgtacttacatttagatgagtttgaaatctcaatggtgtctaattattgcagttaaattctagacatcagttctttaagtctcagaaaacgcccagtgaattggtaaacttagttcttttttttggaagtgctgccttttcacaccaaatccaagaagcctgtgatgtcttatgaaccttatgagaaaactccgaagaggtgtgagcaggattcttctgaatgactgtctggatggttcattactcaagttactgctgctgctattgtctttcctttgttgtcgatctgttattgttgtattattattgttgatgttgtcatggttaatctattttttaaaattgaaatgaagcagaagtaggccttgtgagaactgaaaggtctctttcatttttctcttcctgggattcattttttcaaaacacaatgctggaaaaaaaagatttgtttctgaaagacttcttatggtgctattccataaactttttttcaaacaagtttttgacctttgagccaacccacccgtagactacgaatgtctccctatggctggtagcatttgaagactaaagacttgtcaaatatatcaagagtatatcattgcaagggcagcacttgtcctgtggaacaactacttataatgccttagaattcctgcacatgatcaaacagatcctcctaaaacacaccttttgaaatgttgaacataatagtgtatgttaattaacagctctatgaagaaaatccatttccatgactgaagcattggatataaatatggtgtcctgctttttttgtagaaaatgtaatttgaggatgaattttctgctttaaaggcatgtgtgtttttaaaattaatgaatgtagatgtgtgattgtctgagtgagtgaaactacaagaggtaaaaaataatgggtggttgaaaagttaaaatgtatgtgccaagttctactagaattccatttgaaatagcaccttccttaggtttcatggacaaataatgggaacttctaattttgatcaatcccattaaaaaaaggctctttcctttagagaaactctattttgatgtcaatatagattactgtatgaagtagctttgtgtctgttacctgtccatgagcatacaacattgaatacaattgggtgtattctttcagttttacacaattaaagtatacacacagatgtagcttatctgtttttttcttaaattgttgccctgaaaaaatttcttgcatatgaattgtaaaatgtaaatacatttttataaccaatgttttgatcttattgaatgttactttgaaaatgtataactattgcctgcaatgtagatgagccttttagtagagctgatttattccagtaacttcttccatattttctcactaatctcccgttagccaaaatatgccagaaatgggaaagagaggagaaaaagtcattaacattaacacctatactgttctatactactcctacccgtgtgctaggaatgtgcactagctctttttaaattccatgctacactttgaggactgtcatcatgttctcgttttgtagttcagaaagtgaggctcaaagaatttatgtaaccttcccagagtcacagtgtaaagttagatgttgaaacccagtttatcttatacaaatgagcctctgcttgttctacaaaggtagtagaatcaatctcgacctatataaatagtagattttttatggtgaaactttcccacataaagtaaattttaggggtgaattagagtaaaacttacaggataagcattttgctctttttaagaacagcatgaaatttagaataccaatgatagctatctttaagaatcagaattagtactagaaatttaaaaaaccctatagtttggagttagtatgagccttttgtgaaaataaatatattaaattattttgcctgatgtggtaggggaaatgtattgctctatattaagaaatattctggatattctgattgacatcttattaggccatagtgagctatgctctgcacaactgagaaattaggtatttagaaggcatatagagatgttgtcataactaggtcttcaacgtgaaaattaatttttattgtatcatgtcaagtatcagtttaccacatattatttttatattaattcaacatttgccttaagtgtgttgttaaatgaaagtacagacagcttcattgttgtattgttaataattgttacttactgctccaggcattttattaaattaattttttaaattattttccaccctacatcagtatattggttgtgctttatatttgccaaagtcctaactgactatacatag

SEQ ID NO: 196 - DNA, 1278 bp, Homo sapiens
  ref <308>: DATABASE ACCESSION NUMBER: NM_013242
acaggggaaataccgcggcgccggtagttgctgtggtttccgttctgagctcgcagcttaggagctgaagatcgcggacttagcgttgccgcgtccgagtccggccatcagtggctgcagatccggagccaggagctcaaccacccttcttcggaacagggccggcctgctgctgtgccctcgacgctcggtgcctgtatctactccggggcctaggtcggctccgggggcggcttaggagaaggccgccggcgagatgttcaaaaacacgttccagagcggcttcctctccatcctctacagcatcggcagcaagcctctgcaaatctgggacaaaaaggtacggaatggccacatcaaaagaatcactgataatgacatccagtccctggtgctagagattgaagggacaaatgtaagcaccacatatatcacatgccctgcagaccccaagaagacgctgggaattaaacttcctttccttgtcatgattatcaaaaacctgaagaagtattttaccttcgaagtgcaggtactagatgacaagaatgtgcgtcgtcgctttcgggcaagtaactaccagagcaccacccgggtcaaacccttcatctgcaccatgcccatgcggctggatgacggctggaaccagattcagttcaacttgctagacttcacacggcgagcatacggcaccaattacatcgagaccctcagagtgcagatccatgcaaattgtcgcatccgacgggtttacttctcagacagactctactcagaagatgagctgccggcagagttcaaactgtatctcccagttcagaacaaggcaaagcaataactggaattgtgactcgagggatagacccctggatgtgactcttctttttaaaaggaaactatgtggaggacgatgcaaaaacatatttatcttagtttgctctgctgtagttctgttatttatacttggtgttgcttgtcatggacaccggtgaacatgccgtaactctgtgactgcattgtaagtgcagtgggggtaagcagtcctgtgagtggcgcatgaacgctggagcttattccgccgcctgccccagtgtggggggagatacctttaccatgaacttacagaattaaagatggcccataaggaattccagaccaatatttcttcctgcggtttattctatgttttatatattatctaaatatatgtatatgctgtgtcatactcataatctggaaatgaataaagtgatatattcctggtttgtaaaaaaaaaa

SEQ ID NO: 197 - DNA, 6317 bp, Homo sapiens
  ref <308>: DATABASE ACCESSION NUMBER: NM_013261
tagtaagacaggtgccttcagttcactctcagtaaggggctggttgcctgcatgagtgtgtgctctgtgtcactgtggattggagttgaaaaagcttgactggcgtcattcaggagctggatggcgtgggacatgtgcaaccaggactctgagtctgtatggagtgacatcgagtgtgctgctctggttggtgaagaccagcctctttgcccagatcttcctgaacttgatctttctgaactagatgtgaacgacttggatacagacagctttctgggtggactcaagtggtgcagtgaccaatcagaaataatatccaatcagtacaacaatgagccttcaaacatatttgagaagatagatgaagagaatgaggcaaacttgctagcagtcctcacagagacactagacagtctccctgtggatgaagacggattgccctcatttgatgcgctgacagatggagacgtgaccactgacaatgaggctagtccttcctccatgcctgacggcacccctccaccccaggaggcagaagagccgtctctacttaagaagctcttactggcaccagccaacactcagctaagttataatgaatgcagtggtctcagtacccagaaccatgcaaatcacaatcacaggatcagaacaaaccctgcaattgttaagactgagaattcatggagcaataaagcgaagagtatttgtcaacagcaaaagccacaaagacgtccctgctcggagcttctcaaatatctgaccacaaacgatgaccctcctcacaccaaacccacagagaacagaaacagcagcagagacaaatgcacctccaaaaagaagtcccacacacagtcgcagtcacaacacttacaagccaaaccaacaactttatctcttcctctgaccccagagtcaccaaatgaccccaagggttccccatttgagaacaagactattgaacgcaccttaagtgtggaactctctggaactgcaggcctaactccacccaccactcctcctcataaagccaaccaagataacccttttagggcttctccaaagctgaagtcctcttgcaagactgtggtgccaccaccatcaaagaagcccaggtacagtgagtcttctggtacacaaggcaataactccaccaagaaagggccggagcaatccgagttgtatgcacaactcagcaagtcctcagtcctcactggtggacacgaggaaaggaagaccaagcggcccagtctgcggctgtttggtgaccatgactattgccagtcaattaattccaaaacagaaatactcattaatatatcacaggagctccaagactctagacaactagaaaataaagatgtctcctctgattggcaggggcagatttgttcttccacagattcagaccagtgctacctgagagagactttggaggcaagcaagcaggtctctccttgcagcacaagaaaacagctccaagaccaggaaatccgagccgagctgaacaagcacttcggtcatcccagtcaagctgtttttgacgacgaagcagacaagaccggtgaactgagggacagtgatttcagtaatgaacaattctccaaactacctatgtttataaattcaggactagccatggatggcctgtttgatgacagcgaagatgaaagtgataaactgagctacccttgggatggcacgcaatcctattcattgttcaatgtgtctccttcttgttcttcttttaactctccatgtagagattctgtgtcaccacccaaatccttattttctcaaagaccccaaaggatgcgctctcgttcaaggtccttttctcgacacaggtcgtgttcccgatcaccatattccaggtcaagatcaaggtctccaggcagtagatcctcttcaagatcctgctattactatgagtcaagccactacagacaccgcacgcaccgaaattctcccttgtatgtgagatcacgttcaagatcgccctacagccgtcggcccaggtatgacagctacgaggaatatcagcacgagaggctgaagagggaagaatatcgcagagagtatgagaagcgagagtctgagagggccaagcaaagggagaggcagaggcagaaggcaattgaagagcgccgtgtgatttatgtcggtaaaatcagacctgacacaacacggacagaactgagggaccgttttgaagtttttggtgaaattgaggagtgcacagtaaatctgcgggatgatggagacagctatggtttcattacctaccgttatacctgtgatgcttttgctgctcttgaaaatggatacactttgcgcaggtcaaacgaaactgactttgagctgtacttttgtggacgcaagcaatttttcaagtctaactatgcagacctagattcaaactcagatgactttgaccctgcttccaccaagagcaagtatgactctctggattttgatagtttactgaaagaagctcagagaagcttgcgcaggtaacatgttccctagctgaggatgacagagggatggcgaatacctcatgggacagcgcgtccttccctaaagactattgcaagtcatacttaggaatttctcctactttacactctctgtacaaaaacaaaacaaaacaacaacaatacaacaagaacaacaacaacaataacaacaatggtttacatgaacacagctgctgaagaggcaagagacagaatgatatccagtaagcacatgtttattcatgggtgtcagctttgcttttcctggagtctcttggtgatggagtgtgcgtgtgtgcatgtatgtgtgtgtgtatgtatgtgtgtggtgtgtgtgcttggtttaggggaagtatgtgtgggtacatgtgaggactgggggcacctgaccagaatgcgcaagggcaaaccatttcaaatggcagcagttccatgaagacacgcttaaaacctagaacttcaaaatgttcgtattctattcaaaaggaaatatatatatatatatatatatatatatatatatatataaattaaaaaggaaagaaaactaacaaccaaccaaccaaccaaccaaccacaaaccaccctaaaatgacagccgctgatgtctgggcatcagcctttgtactctgtttttttaagaaagtgcagaatcaacttgaagcaagctttctctcataacgtaatgattatatgacaatcctgaagaaaccacaggttccatagaactaatatcctgtctctctctctctctctctctctctcttttttttttctttttccttttgccatggaatctgggtgggagaggatactgcgggcaccagaatgctaaagtttcctaacattttgaagtttctgtagttcatccttaatcctgacacccatgtaaatgtccaaaatgttgatcttccactgcaaatttcaaaagccttgtcaatggtcaagcgtgcagcttgttcagcggttctttctgaggagcggacaccgggttacattactaatgagagttgggtagaactctctgagatgtgttcagatagtgtaattgctacattctctgatgtagttaagtatttacagatgttaaatggagtatttttattttatgtatatactatacaacaatgttcttttttgttacagctatgcactgtaaatgcagccttcttttcaaaactgctaaatttttcttaatcaagaatattcaaatgtaattatgaggtgaaacaattattgtacactaacatatttagaagctgaacttactgcttatatatatttgattgtaaaaacaaaaagacagtgtgtgtgtctgttgagtgcaacaagagcaaaatgatgctttccgcacatccatcccttaggtgagcttcaatctaagcatcttgtcaagaaatatcctagtcccctaaaggtattaaccacttctgcgatatttttccacattttcttgtcgcttgtttttctttgaagttttatacactggatttgttaggggaatgaaattttctcatctaaaatttttctagaagatatcatgattttatgtaaagtctctcaatgggtaaccattaagaaatgtttttattttctctatcaacagtagttttgaaactagaagtcaaaaatctttttaaaatgctgttttgttttaatttttgtgattttaatttgatacaaaatgctgaggtaataattatagtatgatttttacaataattaatgtgtgtctgaagactatctttgaagccagtatttctttcccttggcagagtatgacgatggtatttatctgtattttttacagttatgcatcctgtataaatactgatatttcattcctttgtttactaaagagacatatttatcagttgcagatagcctatttattataaattatgagatgatgaaaataataaagccagtggaaattttctacctaggatgcatgacaattgtcaggttggagtgtaagtgcttcatttgggaaattcagcttttgcagaagcagtgtttctacttgcactagcatggcctctgacgtgaccatggtgttgttcttgatgacattgcttctgctaaatttaataaaaacttcagaaaaacctccattttgatcatcaggatttcatctgagtgtggagtccctggaatggaattcagtaacatttggagtgtgtattcaagtttctaaattgagattcgattactgtttggctgacatgacttttctggaagacatgatacacctactactcaattgttcttttcctttctctcgcccaacacgatcttgtaagatggatttcacccccaggccaatgcagctaattttgatagctgcattcatttatcaccagcatattgtgttctgagtgaatccactgtttgtcctgtcggatgcttgcttgattttttggcttcttatttctaagtagatagaaagcaataaaaatactatgaaatgaaagaacttgttcacaggttctgcgttacaacagtaacacatctttaatccgcctaattcttgttgttctgtaggttaaatgcaggtattttaactgtgtgaacgccaaactaaagtttacagtctttctttctgaattttgagtatcttctgttgtagaataataataaaaagactattaagagcaataaattatttttaagaaatcgagatttagtaaatcctattatgtgttcaaggaccacatgtgttctctattttgcctttaaatttttgtgaaccaattttaaatacattctcctttttgccctggattgttgacatgagtggaatacttggtttcttttcttacttatcaaaagacagcactacagatatcatattgaggattaatttatcccccctacccccagcctgacaaatattgttaccatgaagatagttttcctcaatggacttcaaattgcatctagaattagtggagcttttgtatcttctgcagacactgtgggtagcccatcaaaatgtaagctgtgctcctctcatttttatttttatttttttgggagagaatatttcaaatgaacacgtgcaccccatcatcactggaggcaaatttcagcatagatctgtaggatttttagaagaccgtgggccattgccttcatgccgtggtaagtaccacatctacaattttggtaaccgaactggtgctttagtaatgtggatttttttcttttttaaaagagatgtagcagaataattcttccagtgcaacaaaatcaattttttgctaaacgactccgagaacaacagttgggctgtcaacattcaaagcagcagagagggaactttgcactattggggtatgatgtttgggtcagttgataaaaggaaaccttttcatgcctttagatgtgagcttccagtaggtaatgattatgtgtcctttcttgatggctgtaatgagaacttcaatcactgtagtctaagacctgatctatagatgacctagaatagccatgtactataatgtgatgattctaaatttgtacctatgtgacagacattttcaataatgtgaactgctgatttgatggagctactttaagatttgtaggtgaaagtgtaatactgttggttgaactatgctgaagagggaaagtgagcgattagttgagcccttgccgggccttttttccacctgccaattctacatgtattgttgtggttttattcattgtatgaaaattcctgtgattttttttaaatgtgcagtacacatcagcctcactgagctaataaagggaaacgaatgtttcaaatct

SEQ ID NO: 198 - DNA, 2740 bp, Homo sapiens
  ref <308>: DATABASE ACCESSION NUMBER: NM_013272
ggcggcggcggcggcggcgaagaactgttccttccacctcttcagccccggcaggacgggggcggccgccgcgaacccggggcggggacagcacgcagcctcgaggcgcgcacccccgcccggcagcggccccgacacccggggcgagcgggaaaacggcaacggcggcggcggcggcggcggcgggggaaggatgcaggggaagaagccgggcggttcgtcgggcggcggccggagcggcgagctgcagggggacgaggcgcagaggaacaagaaaaagaaaaagaaggtgtcctgcttttccaacatcaagatcttcctggtgtccgagtgcgccctgatgctggcgcagggcacggtgggcgcctacctggtgagcgtcctgaccaccctggagcgtaggttcaacctgcagagcgctgacgtgggtgtgatcgctagcagcttcgagatcgggaacctggcgctcatcctcttcgtgagctacttcggggcacgcgggcaccggccgcgcctgatcggctgcggcggcatcgtcatggcgctgggcgcgctgctgtcggcgctgcccgagttcctgacccaccagtacaagtacgaggcgggcgagatccgctggggcgccgagggccgcgacgtctgcgcagccaacggctcgggcggcgacgaggggcccgaccccgacctcatctgccgcaaccggacggctaccaacatgatgtacttgctgctcattggggcccaggtgctcctgggcatcggtgctacccctgtgcagcccctgggcgtctcctactacgacgaccacgtgcggaggaaggactcctcgctctatataggaatcctgttcacgatgctggtatttggaccagcctgcgggtttatcctgggctctttctgtaccaaaatctacgtggatgcggtcttcattgacacaagtaacctggacatcactccggacgacccccgctggatcggagcctggtggggtggctttctgctctgcggtgccttactcttcttctcttccctcttgatgtttgggtttccacagtccctgcccccgcactcagaccccgccatggaaagcgagcaggccatgctctccgaaagagaatacgagagacccaagcccagcaacggggtcctgaggcaccccctggagccagacagcagtgcctcctgtttccagcagctgagagtgatcccgaaggtcaccaagcacctgctctcaaaccctgtgttcacctgcatcatcctggccgcctgcatggagattgcagtggtggctggcttcgctgcctttttggggaagtacctggagcagcagtttaacctcaccacctcttctgccaaccagctgcttgggatgactgcgatcccgtgtgcttgtctgggtatcttcctgggaggtcttttggtgaagaagctcagcctgtctgccctgggggccattcggatggccatgctcgtcaacctggtgtccactgcttgctacgtctccttcctcttcctgggctgcgacactggccctgtggctggggttactgttccctatggaaacagcacagcacctggctcagccctggacccctactcgccctgcaataataactgtgaatgccaaaccgattccttcactccagtgtgtggggcagatggcatcacctacctgtctgcctgctttgctggctgcaacagcacgaatctcacgggctgtgcgtgcctcaccaccgtccctgctgagaacgcaaccgtggttcctggaaaatgccccagtcctgggtgccaagaggccttcctcactttcctctgtgtgatgtgtatctgcagcctgatcggtgccatggcacagacaccctcagtcatcatcctcatcaggacagtcagccctgaactcaagtcttacgctttgggagttctttttctcctccttcgtttgttgggcttcatccctccacccctcatcttcggggctggcatcgactccacctgcctgttctggagcacgttctgtggggagcaaggcgcctgcgtcctctacgacaatgtggtctaccgatacctgtatgtcagcatcgccatcgcgctcaaatccttcgccttcatcctgtacaccaccacgtggcagtgcctgaggaaaaactataaacgctacatcaaaaaccacgagggcgggctgagcaccagtgagttctttgcctctactctgaccctagacaacctggggagggaccctgtgcccgcaaaccagacacataggacaaagtttatctataacctggaagaccatgagtggtgtgaaaacatggagtccgttttatagtgactaaaggagggctgaactctgtattagtaatccaagggtcatttttttcttaaaaaaagaaaaaaaggttccaaaaaaaaccaaaactcagtacacacacacaggcacagatgcacacacacgcagacagacacaccgactttgtcctttttctcagcatcagagccagacaggattcagaataaggagagaatgacatcgtgcggcagggtcctggaggccactcgcgcggctgggccacagagtctactttgaaggcacctcatggttttcaggatgctgacagctgcaagcaacaggcactgccaaattcagggaacagtggtggccagcttggaggatggacatttctggatacacatacacatacaaaacagaaaacattttttaaaagaagtttcctaaaataaa

SEQ ID NO: 199 - DNA, 3237 bp, Homo sapiens
  ref <308>: DATABASE ACCESSION NUMBER: NM_013277
gcgaagtgaagggtggcccaggtggggccaggctgactgaatgtatctcctagctatggactaaataatacatggggggaaataaacaagtattcatgagggtgaaaatgtgacccagcaggaaaattacaactattttcaattgacgttgaataggatgagtcatggaatttaagtgatttactgaagattatactactggtagatagaagagctaaagaaagatggatactatgatgctgaatgtgcggaatctgtttgagcagcttgtgcgccgggtggagattctcagtgaaggaaatgaagtccaatttatccagttggcgaaggactttgaggatttccgtaaaaagtggcagaggactgaccatgagctggggaaatacaaggatcttttgatgaaagcagagactgagcgaagtgctctggatgttaagctgaagcatgcacgtaatcaggtggatgtagagatcaaacggagacagagagctgaggctgactgcgaaaagctggaacgacagattcagctgattcgagagatgctcatgtgtgacacatctggcagcattcaactaagcgaggagcaaaaatcagctctggcttttctcaacagaggccaaccatccagcagcaatgctgggaacaaaagactatcaaccattgatgaatctggttccattttatcagatatcagctttgacaagactgatgaatcactggattgggactcttctttggtgaagactttcaaactgaagaagagagaaaagaggcgctctactagccgacagtttgttgatggtccccctggacctgtaaagaaaactcgttccattggctctgcagtagaccaggggaatgaatccatagttgcaaaaactacagtgactgttcccaatgatggcgggcccatcgaagctgtgtccactattgagactgtgccatattggaccaggagccgaaggaaaacaggtactttacaaccttggaacagtgactccaccctgaacagcaggcagctggagccaagaactgagacagacagtgtgggcacgccacagagtaatggagggatgcgcctgcatgactttgtttctaagacggttattaaacctgaatcctgtgttccatgtggaaagcggataaaatttggcaaattatctctgaagtgtcgagactgtcgtgtggtctctcatccagaatgtcgggaccgctgtccccttccctgcattcctaccctgataggaacacctgtcaagattggagagggaatgctggcagactttgtgtcccagacttctccaatgatcccctccattgttgtgcattgtgtaaatgagattgagcaaagaggtctgactgagacaggcctgtataggatctctggctgtgaccgcacagtaaaagagctgaaagagaaattcctcagagtgaaaactgtacccctcctcagcaaagtggatgatatccatgctatctgtagccttctaaaagactttcttcgaaacctcaaagaacctcttctgacctttcgccttaacagagcctttatggaagcagcagaaatcacagatgaagacaacagcatagctgccatgtaccaagctgttggtgaactgccccaggccaacagggacacattagctttcctcatgattcacttgcagagagtggctcagagtccacatactaaaatggatgttgccaatctggctaaagtctttggccctacaatagtggcccatgctgtgcccaatccagacccagtgacaatgttacaggacatcaagcgtcaacccaaggtggttgagcgcctgctttccttgcctctggagtattggagtcagttcatgatggtggagcaagagaacattgaccccctacatgtcattgaaaactcaaatgccttttcaacaccacagacaccagatattaaagtgagtttactgggacctgtgaccactcctgaacatcagcttctcaagactccttcatctagttccctgtcacagagagtccgttccaccctcaccaagaacactcctagatttgggagcaaaagcaagtctgccactaacctaggacgacaaggcaacttttttgcttctccaatgctcaagtgaagtcacatctgcctgttacttcccagcattgactgactataagaaaggacacatctgtactctgctctgcagcctcctgtactcattactacttttagcattctccaggcttttactcaagtttaattgtgcatgagggttttattaaaactatatatatctccccttccttctcctcaagtcacataatatcagcactttgtgctggtcattgttgggagcttttagatgagacatctttccaggggtagaagggttagtatggaattggttgtgattctttttggggaagggggttattgttcctttggcttaaagccaaatgctgctcatagaatgatctttctctagtttcatttagaactgatttccgtgagacaatgacagaaaccctacctatctgataagattagcttgtctcagggtgggaagtgggagggcagggcaaagaaaggattagaccagaggatttaggatgcctccttctaagaaccagaagttctcattccccattatgaactgagctataatatggagctttcataaaaatgggatgcattgaggacagaactagtgatgggagtatgcgtagctttgatttggatgattaggtctttaatagtgttgagtggcacaaccttgtaaatgtgaaagtacaactcgtatttatctctgatgtgccgctggctgaactttgggttcatttggggtcaaagccagtttttcttttaaaattgaattcattctgatgcttggcccccatacccccaaccttgtccagtggagcccaacttctaaaggtcaatatatcatcctttggcatcccaactaacaataaagagtaggctataagggaagattgtcaatattttgtggtaagaaaagctacagtcattttttctttgcactttggatgctgaaatttttcccatggaacatagccacatctagatagatgtgagctttttcttctgttaaaattattcttaatgtctgtaaaaacgattttcttctgtagaatgtttgacttcgtattgacccttatctgtaaaacacctatttgggataatatttggaaaaaaagtaaatagctttttcaaaatgaaaaaaaaaa

SEQ ID NO: 200 - DNA, 3002 bp, Homo sapiens
  ref <308>: DATABASE ACCESSION NUMBER: NM_013981
cctccaggtcctggcgcacagggtgggagcgctgcgctgcgccgcgctgcgcatcgcggcccgcttgccgcctgccccctgccctagctgggccacctccccgggctgccggtggagggctaagaggcgctaacgttacgctgtttccggttttccagcgggctctgtttcccctcccaaggcggcggcggctgagcggcggagccccccaaatggcctggccagatgcggcaggtttgctgctcagcgctgccgccgccgccactggagaagggtcggtgcagcagctacagcgacagcagcagcagcagcagcgagaggagcagcagcagcagcagcagcagcagcgagagcggcagcagcagcaggagcagcagcaacaacagcagcatctctcgtcccgctgcgcccccagagccgcggccgcagcaacagccgcagccccgcagccccgcagcccggagagccgccgcccgttcgcgagccgcagccgccggcggcatgaggcgcgacccggcccccggcttctccatgctgctcttcggtgtgtcgctcgcctgctactcgcccagcctcaagtcagtgcaggaccaggcgtacaaggcacccgtggtggtggagggcaaggtacaggggctggtcccagccggcggctccagctccaacagcacccgagagccgcccgcctcgggtcgggtggcgttggtaaaggtgctggacaagtggccgctccggagcggggggctgcagcgcgagcaggtgatcagcgtgggctcctgtgtgccgctcgaaaggaaccagcgctacatctttttcctggagcccacggaacagcccttagtctttaagacggcctttgcccccctcgataccaacggcaaaaatctcaagaaagaggtgggcaagatcctgtgcactgactgcgccacccggcccaagttgaagaagatgaagagccagacgggacaggtgggtgagaagcaatcgctgaagtgtgaggcagcagccggtaatccccagccttcctaccgttggttcaaggatggcaaggagctcaaccgcagccgagacattcgcatcaaatatggcaacggcagaaagaactcacgactacagttcaacaaggtgaaggtggaggacgctggggagtatgtctgcgaggccgagaacatcctggggaaggacaccgtccggggccggctttacgtcaacagcgtgagcaccaccctgtcatcctggtcggggcacgcccggaagtgcaacgagacagccaagtcctattgcgtcaatggaggcgtctgctactacatcgagggcatcaaccagctctcctgcaagtgtcctgtgggatacaccggggacaggtgtcagcagttcgcaatggtcaacttctccaaagccgaggagctgtaccagaagagggtcctgaccatcacgggcatctgcgtggctctgctggtcgtgggcatcgtctgtgtggtggcctactgcaagaccaaaaaacagcggaagcagatgcacaaccacctccggcagaacatgtgcccggcccatcagaaccggagcttggccaatgggcccagccacccccggctggacccagaggagatccagatggcagattatatttccaagaacgtgccagccacagaccatgtcatcaggagagaaactgagaccaccttctctgggagccactcctgttctccttctcaccactgctccacagccacacccacctccagccacagacacgagagccacacgtggagcctggaacgttctgagagcctgacttctgactcccagtcggggatcatgctatcatcagtgggtaccagcaaatgcaacagcccagcatgtgtggaggcccgggcaaggcgggcagcagcctacaacctggaggagcggcgcagggccaccgcgccaccctatcacgattccgtggactcccttcgcgactccccacacagcgagaggtacgtgtcggccctgaccacgcccgcgcgcctctcgcccgtggacttccactactcgctggccacgcaggtgccaactttcgagatcacgtcccccaactcggcgcacgccgtgtcgctgccgccggcggcgcccatcagttaccgcctggccgagcagcagccgttactgcggcacccggcgccccccggcccgggacccggacccgggcccgggcccgggcccggcgcagacatgcagcgcagctatgacagctactattaccccgcggcggggcccggaccgcggcgcgggacctgcgcgctcggcggcagcctgggcagcctgcctgccagccccttccgcatccccgaggacgacgagtacgagaccacgcaggagtgcgcgcccccgccgccgccgcggccgcgcgcgcgcggtgcgtcccgcaggacgtcggcggggccccggcgctggcgccgctcgcgcctcaacgggctggcggcgcagcgcgcacgggcggcgagggactcgctgtcgctgagcagcggctcgggcggcggctcagcctcggcgtcggacgacgacgcggacgacgcggacggggcgctggcggccgagagcacacctttcctgggcctgcgtggggcgcacgacgcgctgcgctcggactcgccgccactgtgcccggcggccgacagcaggacttactactcactggacagccacagcacgcgggccagcagcagacacagccgcgggccgcccccgcgggccaagcaggactcggcgccactctaggccccgccgcgcgcccctccgccccgcccgccccactatctttaaggagaccagagaccgcctactggagagaaaggaggaaaaaagaaataaaaatatttttattttctataaaaggaaaaaagtataacaaaatgttttattttcattttagcaaaaattgtcttataatactagctaacggcaaaggcgtttttatagggaaactatttatatgtaacatcctgatttacagcttcggg

SEQ ID NO: 201 - DNA, 2155 bp, Homo sapiens
  ref <308>: DATABASE ACCESSION NUMBER: NM_013999
aaaggaccgaggcgtgcagcggacagcagatggatcccgcggccagcagctgcatgaggagcctccagcccccagcccctgtctggggctgccttcgaaacccccactcggaaggcaatggggcctcagggctaccccactacccgcccaccccgttctccttccaccagaaaccagacttcctggcgacagcgacggcagcgtaccctgacttctcagcctcctgcctggcagccaccccacacagcctgccccaggaggagcacatcttcactgagcagcaccccgctttcccacagtcccccaactggcacttccctgtctcagacgcccggcgcaggcccaactcaggcccggcagggggttccaaggaaatggggaccagcagcctgggcctggtggacaccacaggaggcccaggcgatgactacggggtgcttgggagcactgccaatgagacagagaagaaatcatccaggcggagaaaggagagttcaggtcaaagtgtggttccagaaccgaaggatgaagtggaagcgtgtgaagggaggtcagcccatctcccccaatgggcaggaccctgaggatggggactccacagcctctccaagttcagagtgagattctgcatggaggaaaaatgactaaggactgagccccctacccaactacccccaccccaatcccaccttcaccctcttccttccccagccagggcagcctctccacatctttccctgactcttggatatgaaactgcccagcattcctgggagtcttaggattttctaggaagttctgtccagcctcttagcagcctcttccctagggcctttgctcccacactctcatggaatcagacagagatcctaccgggccggatgaatctggaaacagcttcagagatactgcttctcagcgtctcttggctgccacccatgcctcctcctaccgctgttctcctaggtcagccaggcctcctcctggtctggacaccacctggcctggtgggagaggagctttggaaccagctggcgactcggaaagtaaatgcttcaaaaggaaggaaatgacagagacacacgcccttgcccaccttcctctgtaggctgcacatctgaggctttggggccccttagttgtcccgaaaccccaagaaaaatcagaatgaggagagtcaaggacagcaactcagctgctgcaagccagaaacacatccctgtctccaaatttgttggctaagtggagacacttctgagaactgactagagaagacagaaaaatagcccgatgtaggtttcggtgtccccatataggcccgtccacacaggcttgactgggtggacaagaatgaacccatgacagcacctgctgcttcaaaatcaaaatcaatttagggatacagcaggggctgttgggctgtgctccagagaaaaggagcagctactccttttaaatccacgatttctggattgaaaacctgtccagatgctgagttgttgggctgaacaactaggagctgaaaacaacgtagaggctggaaagtgtcccctgcattctggaggggaggggagataataaggagggctgctgggtgagggcctggagatgtggaaccctggagtggaaggttctccagtgacagtgtcctgtgactgcaaaaggggacaagaaaatccctcttcctccatgggatggatttaagctcttgctgtgtgttctacaaatgctgttattgtgggaggaaatgctaggtttttgtgtgtggactgcccagacctcagccaggtcttctggagatgacatttgaggactgatggccaaagagcatgggggactgaagccctggctgcctcagcgctctgtctcccaacaccagctggtgttgcagagggaggtcaacgtgagtttggatctcttgtacgcagatgtaatcattcacatgtaaaaataaccccacctccccaccccaaaaagggcaagagctgtggaaaatgattgccaaatgagatggctggttagagcatgattttttctaaagcatacttcatatattttcttaagattacatcaagctaattgtgcgagctcaattcactttgtaagaaaactctcggagaaataaaatcaataaaaagccaaaaaaaaaaataag

SEQ ID NO: 202 - DNA, 1580 bp, Homo sapiens
  ref <308>: DATABASE ACCESSION NUMBER: NM_014015
gcgcgaggacctgcggggcggggcgggagagaaggctgccgggaccggccctagacactgagccgcggtgggatccccaccggctctgcgaggccctgcgagcgccagggaggcgccacgagggagccgggcagccgcgggccacttcaggggggcccgcctcgccgcccgggcggtcgagagatccttgggggcacatctcggggtgcggtgacccgcccggcgcatttcgggggtcggggcgcaattgccaggggacatctggagcccggccctgcttctgtcgggctccagggtacccctggatggctgcgctgtgccctcgccggccgcccgggcgccgcagcggctgagttcgccgggatcgccgggccgccgcccttgccacccgctgcatgctcggcgcccgggtcgcggcccacctggacgcactgggccccctggtcccctacgtgccgccgccgctgctgccctctatgttctacgtgggcctgttcttcgtcaatgtgctgatcctgtactacgccttcctcatggagtacatcgtcctcaacgtgggcctcgtcttcctgcccgaggacatggaccaggcgctcgtggacctcggcgtgctctccgaccccggctcgggcctttacgatgctgactcggagctcgacgtctttgatgcgtacttggagtagggtctcgactgctgttcccctcttccctacacgatccgcaacccatgccctggaccagccgcccagatcatgccgccgcagctggttgggggcaccatctggacggggatggttccccaggaggagaccctcccctgcctccgaggcctacctgctcccctcaaaagcttcgtgccaacagagaggttcctgtttgaacccaggagagtggaagagagattgggactgagtgctgaggttgggaaggcacctgctcccacagaagggggaacgcaagaggcatcccaagacctcatctgcctgcagtgtcaaatcgatggcctggccttggcttctgattatttgcagctgcgatggatgtttacaggaacccagccagagtttgcctccctgcacttcatcccggagcgcacctgcttcccccacttcaccttcggagaggacacttcaaactgcggacacacgcaaaagcgactcccagctccgtttgatgtgagttgagccttcaggccagctgggtttagcccgaggctggtcttagatgcagcgactgtttcaggggtgactcagaagaaaaagaagctgaggaagctgttggggggctgagggtgggattctcgctccttcatttcaggttactcgttcttcagcaagttggcaaaacagacatcatgctggtgagtgccacgttactcccctggctggaaatgcttttctgaaagtatgagtgttgtgcctacttaattctgataaacctgtctaagcaatacttaggaggcttacttctttggattaaaaaaaaatgtatgcaactccaaaaaaaaaaaaaaaaaaaaaaaaaaaaaaaaaaaaaaaaaaaaaaaaaaaaaaaaaaaaaaaaaaaaaaaaaaaaaaaaa

SEQ ID NO: 203 - DNA, 1225 bp, Homo sapiens
  ref <308>: DATABASE ACCESSION NUMBER: NM_014067
gcgccgtaaatagagtccaagtgggcggagagccgtcccgcgccgcccgctcatgtctctacagagccgactgtccggccgcctggcacagctgcgcgcggcggggcagctgctcgtccccccgcgcccccggcccggacacttggcgggtgccacgaggacccgcagcagcacgtgcggtcccccggcgttcctgggcgtgttcggccgccgtgcgcggacctcggcgggagttggggcgtggggggcggcggcggtggggcggacagccggggtgcgcacttgggcccccctggccatggcggcgaaggtggacctgagcacctccaccgactggaaggaggcgaaatcctttctgaagggcctgagtgacaagcagcgggaggaacattacttctgcaaggactttgtcaggctgaagaagatcccgacatggaaggagatggcgaaaggggtggctgtgaaggtggaggagcccaggtataaaaaggacaagcagctcaatgagaaaatctccctgctccgcagcgacatcaccaagctggaggtggacgccatcgtcaacgccgccaacagctccctgctcggaggcggtggcgtggacggctgcattcatcgggccgccggccccctgcttaccgacgagtgccggaccctgcagagctgtaagactggcaaggccaagatcaccggcggctatcggctcccggccaagtacgtcatccacacagtggggcccatcgcctacggggagcccagcgccagccaggctgccgagctccgcagctgctacctgagcagtctggacctgctgctggagcaccggctccgctcggtggcgttcccctgcatctccaccggcgtgtttggctacccctgtgaggcggccgccgagatcgtgctggccacgctgcgagagtggctggagcagcacaaggacaaggtggaccggctgatcatctgcgtgttcctcgagaaggacgaggacatctaccggagccggctcccccactacttccccgtggcctgaggctcccgcagcccaccctgaccgggactgacccgccttcgggaccccgctcccagctctgagaggtcgccaaagcctgcagcctggcctgggcctggccaccccttctttccctccgcgccccgcccccgaggagcctaataaagatctcgttgtggcaaaaaaaaaaaaaaaaaaaaaaaaaaaaaaaaaaaa

SEQ ID NO: 204 - DNA, 928 bp, Homo sapiens
  ref <308>: DATABASE ACCESSION NUMBER: NM_014176
gcgcgcagcgctggtaccccgttggtccgcgcgttgctgcgttgtgaggggtgtcagctcagtgcatcccaggcagctcttagtgtggagcagtgaactgtgtgtggttccttctacttggggatcatgcagagagcttcacgtctgaagagagagctgcacatgttagccacagagccacccccaggcatcacatgttggcaagataaagaccaaatggatgacctgcgagctcaaatattaggtggagccaacacaccttatgagaaaggtgtttttaagctagaagttatcattcctgagaggtacccatttgaacctcctcagatccgatttctcactccaatttatcatccaaacattgattctgctggaaggatttgtctggatgttctcaaattgccaccaaaaggtgcttggagaccatccctcaacatcgcaactgtgttgacctctattcagctgctcatgtcagaacccaaccctgatgacccgctcatggctgacatatcctcagaatttaaatataataagccagccttcctcaagaatgccagacagtggacagagaagcatgcaagacagaaacaaaaggctgatgaggaagagatgcttgataatctaccagaggctggtgactccagagtacacaactcaacacagaaaaggaaggccagtcagctagtaggcatagaaaagaaatttcatcctgatgtttaggggacttgtcctggttcatcttagttaatgtgttctttgccaaggtgatctaagttgcctaccttgaatttttttttaaatatatttgatgacataatttttgtgtagtttatttatcttgtacatatgtattttgaaatcttttaaacctgaaaaataaatagtcatttaatgttgaaaaaaaaaaaaaaaaaaaaaaaaaaaaaaa

SEQ ID NO: 205 - DNA, 3150 bp, Homo sapiens
  ref <308>: DATABASE ACCESSION NUMBER: NM_014251
ggccaggaacgcacgctgcctggccgtatcgccgcccccaccgacgccgccgccgggactagaagtgagccgcccgggtcccaaacgccagccagccagtcagtgggtcccgcagtcgcccgcaaccggggcgaatcatggcggccgccaaggtggctttaaccaagagagcagatccagctgagcttagaacaatatttttgaagtatgcaagcattgagaaaaacggtgaatttttcatgtcccccaatgactttgtcactcgatacttgaacatttttggagaaagccagcctaatccaaagactgtggaacttttaagtggagtggtggatcagaccaaagatggattaatatcttttcaagaatttgttgcctttgaatctgtcctgtgtgcccctgatgctttgtttatggtagcctttcagctgtttgacaaagctggcaaaggagaagtaacttttgaggatgttaagcaagtttttggacagaccacaattcatcaacatattccatttaactgggattcagaatttgtgcaactacattttggaaaagaaagaaaaagacacctgacatatgcggaatttactcagtttttattggaaatacaactggagcacgcaaagcaagcctttgtgcaacgggacaatgctaggactgggagagtcacagccatcgacttccgagacatcatggtcaccatccgcccccatgtcttgactccttttgtagaagaatgtctagtagctgctgctggaggtaccacatcccatcaagttagtttctcctattttaatggatttaattcgctccttaacaacatggaactcattagaaagatctatagcactctggctggcaccaggaaagatgttgaagtgactaaggaggagtttgttctggcagctcagaaatttggtcaggttacacccatggaagttgacatcttgtttcagttagcagatttatatgagccaaggggacgtatgaccttagcagacattgaacggattgctcctctggaagagggaactctgccctttaacttggctgaggcccagaggcagaaggcctcaggtgattcagctcgaccagttcttctacaagttgcagagtcggcctacaggtttggtctgggttctgttgctggagctgttggagccactgctgtgtatcctatcgatcttgtaaaaactcgaatgcagaaccaacgatcaactggctcttttgtgggagaactcatgtataaaaacagctttgactgttttaagaaagtgctacgctatgaaggcttctttggactgtatagaggtctgttgccacagttattgggagttgccccagagaaggccataaaacttacagtgaacgattttgtgagggataaatttatgcacaaagatggttcggtcccacttgcagcagaaattcttgctggaggctgcgctggaggctcccaggtgattttcacaaatcctttagaaatcgtcaagatccgtttgcaagtggcaggagaaatcaccactggtcctcgagtcagtgctctgtctgtcgtgcgggacctggggttttttgggatctacaagggtgccaaagcatgctttctgcgggacattcctttctcggccatctactttccgtgctatgctcatgtgaaggcttcctttgcaaatgaagatgggcaggttagcccaggaagcctgctcttagctggtgccatagctggtatgcctgcagcatctttagtgacccctgctgatgttatcaagacgagattacaggtggctgcccgggctggccaaaccacttacagcggagtgatagactgctttagaaagatactgcgtgaagaaggaccaaaagctctgtggaagggagctggtgctcgtgtatttcgatcctcaccccagtttggtgtaactttgctgacttacgaattgctacagcgatggttctacattgattttggaggagtaaaacccatgggatcagagccagttcctaaatccaggatcaacctgcctgccccgaatcctgatcacgttgggggctacaaactggcagttgctacatttgcagggattgaaaacaaatttggactttacctacctctcttcaagccatcagtatctacctcaaaggctattggtggaggcccataggaagatcagccctgggatagtgctgtctttttgtgggtactgcagtaaagaacatccctcctgggaatgaagcaatgcttcatcccttttacgtccatctcttgtttaaattcaagtccaggcttttttatcatgtgaaatcattcattttctgggtgttttcttaaccagatcattgtgaaattattcataattattatttggccctctgcccagaaacctttgtttgcatctgaaaattgatgggatttggtcaacactaacatgatttggggaaaggagcaagtcagaatagaaattagtactcccctccttgaactaggattgtagtcccaaagaggctactgtaaggcaatcatggtgctcagagcagtgtttcgtgtgtgttttaaactggtaggaaactaggtgcatatttataaaaataaaaaacactgggagaaatgaaaaaatatatatcaaatatattcagcctggcttcaaattgtaagcatgcacaaattctgtctctggattatattatgaagcttttatgtgaaacatgtttctttgtaatgaaaaccacattggagatgtttagtaatcatattgttactggtaccaagactactagggaaatgcctttgtactttagggaagtacttttggcattttactgtacagacagaaaaaactgagatgtagcccctctcctggaagtgctaattttgaaaaactgctcatatgatgtacatgtactgattactgcctattttaataaacactcttgaaaaatgcatgttgccctgttgctgcctgccctattctcctcatctccccatcattggtacccacttgcttttaaaatccactttatcttgaataatgtaagacaaatatgttctgacataagtatttaattcatgttgccttgcataatggtcagaggcgcatgaatttgtgaaggtggaaataaactatttgtaaagtgaaaaaaaaaaaaaaa

SEQ ID NO: 206 - DNA, 5497 bp, Homo sapiens
  ref <308>: DATABASE ACCESSION NUMBER: NM_014258
atacacaatcatcatcttactagttctctgtgttgctcgctaaccagtcccccagttcagtagactggagcccagagcctgcttacttgtcaggtgtttattttgtcttgctttttttttttttttaaatgaagtcaaaatgccaataagaccagatctccagcagttggaaaaatgcattgatgatgctttaagaaaaaatgatttcaaacctttgaaaacacttttgcaaattgatatttgtgaagatgtgaagattaaatgcagcaaacagtttttccacaaggtggacaaccttatatgcagggaacttaataaagaggatatccacaatgtttcagccattttggtttctgttggaagatgtggcaaaaatatcagtgtattggggcaagctggacttctaacgatgataaaacaaggactaatacaaaagatggttgcctggtttgaaaaatccaaggacattattcagagtcaaggaaattcaaaagatgaagctgttctaaatatgatagaagacttagttgatcttctgctggtcatacatgatgtcagtgatgaaggtaaaaaacaagtagtggaaagtttcgtacctcgcatttgttccctggttattgactcaagagtgaatatttgtattcagcaagagattataaaaaaaatgaatgctatgcttgacaaaatgcctcaagatgcccggaaaatactctctaaccaagaaatgttaattctcatgagtagtatgggagaaaggattttagatgctggagattatgacttacaggtaggcattgtagaagctttgtgtagaatgaccacagaaaaacaaagacaagaactggcacatcagtggttttcaatggattttattgctaaggcatttaaaagaattaaggactctgaatttgaaacagattgcaggatatttctcaaccttgtaaatggcatgcttggagacaaaagaagggtctttacatttccttgtttatcagcatttcttgataaatatgagctgcaaataccatcagatgaaaaacttgaggaattttggattgattttaatcttgggagtcagactctctcattctacattgctggagataatgatgatcatcaatgggaagcagttactgtgccagaggaaaaagtacaaatatacagcattgaagtgagagaatcaaagaagctactgacaataattctgaaaaatacagtaaaaattagcaaaagagaagggaaagaattgcttttgtattttgacgcatcactagaaatcactaatgtaactcaaaaaatttttggtgcaactaaacatagggaatctatcagaaaacaaggtatttcagttgccaaaacgtcgctgcatatactttttgacgcaagtggatcacagattctagtgccagaaagtcaaatctcaccagtcggagaagagctcgttagtttaaaggaaaaatcaaagtccccaaaggaatttgctaaaccttcaaaatatatcaaaaacagtgacaaagggaatagaaataatagtcagcttgagaaaactactcctagcaaaagaaaaatgtctgaagcatcaatgattgtttctggtgcagatagatacactatgagaagtccagtgcttttcagcaacacatcaataccaccacgaagaagaagaattaaaccaccactgcaaatgacgagctctgcagagaaacctagtgtttctcaaacatcagaaaatagagtggataatgctgcatcactgaaatctagatcatcagaaggaagacatagaagagataatatagacaaacatatcaaaactgctaagtgtgtagaaaacacagaaaataagaatgttgaattcccaaaccaaaattttagtgaactccaggatgttataccagattcacaggcagcggaaaaaagagatcatactatattacctggtgttttagacaacatctgtggaaataaaatacacagcaaatgggcatgttggacacctgtaacaaacattgaactatgtaataaccaaagagcaagtacttcgtcaggagacacattgaatcaagatattgttataaataaaaaacttactaaacaaaaatcatcctcttcaatatctgatcataattctgaaggaacaggaaaagtgaaatataagaaagaacaaaccgaccatatcaaaatagataaagcagaagtagaagtttgcaagaaacacaatcagcaacaaaatcatcctaaatattcagggcagaaaaatactgaaaatgccaagcagagtgattggcctgttgaatctgaaactacttttaaatcggttctcctaaataagacaattgaagaatcgctgatatataggaagaaatacatattgtcaaaagatgtgaatactgctacttgcgataaaaatccatctgctagcaaaaatgtgcaaagtcatagaaaagcagagaaagaattgacttctgagcttaattcctgggattcgaaacaaaaaaaaatgagagaaaagtcaaaagggaaagaatttaccaatgtagcagaatccttgataagccaaatcaataaaagatacaaaacaaaagatgacatcaagtctacaagaaaattaaaggagtctttgattaacagtggtttttcaaacaaacctgttgtacaactcagtaaggaaaaagttcagaaaaaaagctacagaaaactgaagactacctttgttaatgttacttctgaatgcccagtgaatgatgtttacaattttaatttgaatggagctgatgaccctatcataaaacttggaatccaagagtttcaagctacagctaaagaagcttgtgcggataggtcaattagattggtaggtccaaggaatcatgatgaacttaaatcttctgtcaaaacaaaagataaaaaaattataacaaatcatcaaaagaaaaatctgtttagtgatactgaaacagagtacagatgtgatgacagcaagactgatattagctggctaagagaaccgaaatcaaaaccacagctaatagactatagcagaaataaaaatgtgaagaatcataaaagtggaaaatcaagatcatccttggaaaagggacagccaagctctaaaatgacacccagtaaaaatatcacaaaaaagatggacaagacaattccggaaggaagaatcagacttccacgaaaagcaaccaaaacaaaaaaaaactataaagatctctcaaattcagaatcagagtgtgaacaagaattttcacattcatttaaagagaacataccagtaaaggaggagaatatccattccagaatgaaaacggtaaagctaccaaagaaacaacagaaagtcttctgtgctgaaacagaaaaggaactatcaaaacaatggaaaaactcatctctactaaaagatgctatacgagataattgccttgacttatctcccagatctttatctggcagtccatcatctatagaagtaacgagatgtatagagaaaataacagaaaaggattttactcaggattatgactgcataacaaaatctatatcaccttatccaaaaacttcatcacttgaatccttaaatagtaacagtggagttggaggtacaataaagtcacccaaaaacaatgagaaaaacttcctgtgtgcaagtgaaagttgttcaccaattccacgaccactgtttttgcccagacatactccaactaagagtaatactattgtaaatagaaaaaaaataagttctctggtacttacacaagaaacacaaaacagtaacagctattcagatgtaagcagttatagttcagaagaacggtttatggaaattgaatctccacatatcaatgaaaattatatacaaagcaaaagagaggaaagtcatttagcatcttcattatccaagtctagtgaaggaagagagaaaacgtggtttgacatgccctgtgatgctactcatgtatcaggccccacccaacatcttagtcgcaaaagaatatatatagaagataatctaagtaattccaatgaagtagaaatggaagagaaaggagaaaggagagcaaacttgcttcccaaaaaactgtgtaaaattgaagatgcagatcatcatatccacaaaatgtctgaaagtgtatcttcattatcaacaaatgacttttctattccttgggagacctggcaaaatgaatttgcagggatagagatgacttatgagacttacgagaggctcaattcagaatttaagagaaggaataatatccgacataaaatgttgagttattttactacgcagtcttggaaaacagctcagcaacatctgagaacaatgaatcatcaaagtcaggactctaggattaaaaaacttgataaattccaattcattatcatagaggagctggagaattttgaaaaagattcacagtctttaaaagatttggaaaaggaatttgtggacttttgggaaaagatatttcagaagttcagtgcatatcaaaaaagcgaacaacagaggcttcatcttttgaaaacttcattggctaaaagtgtcttctgtaatactgatagtgaagaaactgtttttacatccgagatgtgtttgatgaaagaagatatgaaagtgctgcaagacaggcttcttaaggacatgctagaagaggagcttcttaatgtacgcagagaactgatgtcagtattcatgtctcatgaaagaaatgctaatgtgtgaaatctagtttttatcaccatactttatctaattattattctctgtatataactgaggaaataagaatagtcctacaaagagaaaaatatacatgtcaccgaagcaagtgtaccctttataggaaccctcaaattaaaaaaaaatgtcttttaatggatgagagggaaccactataacatgagtccaagcccagaagacttctgtctatacaatatttttttttaattttggagataaaagctttaagaaactttttgagttaattatactcataaaatgagtttctttaataaattaaattttattgtgtaaaatgtattattacataaaatgtgtttttgaatcaatgcagtttggggatgaatataattaaaatatgtttaataacttagaattcaactaataaaaatttagccacacttacaagggggaggaagtccctagtttaaaatgtataactgagtggtagatcagtactttcagcacactgttggaaacatttattcagatatggctctaatgtattaggaagcactaaatggcctaaaaaagctactacattgcctaaatatgttaattcaatatagaagtcctatttcataaccaggctgtttgacaaatacttttaatctagtagtcattgtaatatcttgctagattaatttataaaaatgagtatacatttgatttgcttttaatgaagttgaaataaatgcttatgtcacttgaataaatataaatcattataaaaaaaaaaaaaaaaaa

SEQ ID NO: 207 - DNA, 1630 bp, Homo sapiens
  ref <308>: DATABASE ACCESSION NUMBER: NM_014317
atcgcgggccagaggcggagccgccgccctgccgcgactttcagactccgaccatggcctcgcgctggtggcggtggcggcgcggctgctcctggaagccggcggcgcggagccccgggcccggctcccccggccgtgcgggaccgggccggggccgcgcgccgctgccgatgcccgcgcaggctcataggcagaagggacttgacttgtctcagataccctattttaatcttgtgaagcatttaacacctgcctgtccaaatgtatatagtatatcacagtttcatcacacaaccccgtacagcaaaacacacagtggtgagaaatacaccgatcctttcaaactcggttggagagacttgaaaggtctgtatgagggtattagaaaggaacccctcatatcaacaacagaacttaaggaaatctctgagtactactttgatgtaaaaggaaaagcctttagaccgattattgtggtgctaatggcccgagcatgcaatattcatcataacaactcccgacatgtgcaagccagccagcgcgccatagccttaattgcagaaatgatccacactgctagtctggttcacgatgacgttattgacgatgcaagttctcgaagaggaaaacacacagttaataagatctggggtgaaaagaaggctgttcttgctggagatttaattctttctgcagcatctatagctctggcacgaattggaaatacaactgttatatctattttaacccaagttattgaagatttggtgcgtggtgaatttcttcagctcgggtcaaaagaaaatgagaatgaaagatttgcacactaccttgagaagacattcaagaagaccgccagcctgatagccaacagttgtaaagcagtctctgttctaggatgtcccgacccagtggtgcatgagatcgcctatcagtacggaaaaaatgtaggaatagcttttcagctaatagatgatgtattggacttcacctcgtgttctgaccagatgggcaaaccaacatcagctgatctgaagctcgggttagccactggtcctgtcctgtttgcctgtcagcagttcccagaaatgaatgctatgatcatgcgacggttcagtttgcctggagatgtagacagagctcgacagtatgtactacagagtgatggtgtgcaacaaacaacctacctcgcccagcagtactgccatgaagcaataagagagatcagtaaacttcgaccatccccagaaagagatgccctcattcagctttcagaaattgtactcacaagagataaatgacaactctttctgttctttctggcagctatcttaccagactgtgcctaaagaattttgtggaatacactttgtttgcttcatgtgcagataaccaaaaatcattttaaaagatatcaaacttattgatgggcaatttatttttttttattgcaaaaggtttttcagaaaactttttaaatgtaattaataaaccacctgaatctgtcattctagtcctataaattataatcaaggtatcttgatggttatatgtggtattgtttacactgttaatatccacatgtaaggccattacacaaataaataaccaatgttaaaattcaaaaaaa

SEQ ID NO: 208 - DNA, 1835 bp, Homo sapiens
  ref <308>: DATABASE ACCESSION NUMBER: NM_014370
ggagctgcgggctgcgtggccgggatgagcgccagcacgggcggtggtggggacagcggcggcagcggcggcagtagcagcagctcacaggcctcctgcgggcccgagtcctcgggctccgaactagccctggccacaccggtgcctcagatgctgcagggccttctgggctccgacgacgaggaacaggaagaccccaaagactactgcaagggcggctaccaccctgtgaagatcggcgacgtgttcaatgggcggtaccacgtggtgcgcaaactgggctggggccacttctccaccgtctggctctgctgggacatccagcgcaagcgctttgtggccctcaaagtggtgaagagtgcggggcattacacggagacagctgtggatgagatcaagctcctgaaatgtgtccgggacagcgaccccagtgaccccaaaagagagaccattgtccagctcattgatgacttcaggatctcaggagtcaatggagtccatgtgtgcatggtgctggaggtgctgggccaccagctcctcaaatggatcatcaagtccaactaccagggcctgcccgtgccctgcgtgaagagcatcgtgaggcaggtgctgcacggcctggactacctccacaccaagtgcaagatcatccacacggacatcaagcccgagaacatcttgctgtgtgtgggggacgcttacatcaggcgcctggctgccgaggccacggagtggcaacaggcaggggcgccgcccccctcccgctccatagtcagcactgccccccaggaggtcttgaccggtaagctgtccaaaaacaagaggaagaagatgaggcgcaaacggaaacagcagaagcggctgctggaggagcggctgcgggacctgcagaggctggaggccatggaggctgccacccaggctgaggactctggcttgagactagacgggggcagcggctccacatcctcttcaggcttctccggctccctcttctctcctgcctcctgctccatcctctccggctcgtccaatcagcgagagaccgggggcctcctgtcgcctagcacaccattcggtgcctcgaacctcctggtgaaccccctggagccccaaaatgcagataagatcaagatcaagatcgcagacctgggcaacgcctgctgggtgcacaagcacttcacggaagacatccagactcggcagtaccgggccgtcgaggtgctgatcggcgccgaatacggccccccggcagacatctggagcacagcctgcatggccttcgagctggccactggtgactacctgttcgagccgcattctggagaagactacagtcgtgatgaggaccacatcgctcacatagtggagcttctgggggacatccccccagccttcgccctctcaggccgctattcccgggagttcttcaaccggagaggagagctgcggcacatccacaatctcaagcactggggcctgtacgaggtactcatggaaaagtacgagtggcccctagagcaggccacacagttcagcgcctttctgctgcccatgatggagtacatccccgaaaagcgggccagtgccgctgactgcctccagcacccctggctcaacccctaggcccggctgtggctccacctccagctctccgtgccttaagggaaaagcgggacagctcccaccaccctgctgggcgccagttctccacaaccacagggcagagagacgctggagccaggcccggctctcagagcgtgttctgcctgagacccccgtgagggctctcggagaaagtgtgtgtattcctttcttaataaagtgtggactga

SEQ ID NO: 209 - DNA, 2681 bp, Homo sapiens
  ref <308>: DATABASE ACCESSION NUMBER: NM_014669
cggccgcgtcctcaagccggcacctgagcggcggagacggctgtagcacaaggatctgcatctccaatggatactgaggggtttggtgagctccttcagcaagctgaacagcttgctgctgagactgagggcatctcagagcttccccatgtggaacggaacttacaggagatccagcaggcgggagagcgcctgcgttcccgtaccctaacacgcacgtcccaggagacggcagatgtcaaggcgtcagttctcctcgggtctcggggacttgacatatcccacatctcccagcgattggagagtctgagtgcagccaccacctttgagcctcttgagcctgtgaaggacactgacattcagggcttcctgaagaatgagaaggacaatgccctgctgtctgccatcgaagagtcccggaagaggaccttcggcatggctgaggagtaccatcgggagtcaatgttggttgagtgggagcaagtgaaacagcgaattctgcacacactgctggcatcaggagaagacgcccttgactttactcaagaaagcgagccaagctacatcagtgatgtgggaccccctggtcgaagctctctggataacatcgagatggcctatgcgcggcaaatttatatctataatgagaaaattgtaaatggacacctgcagcctaacctggtggacctttgtgcttccgtcgcagagctggatgataagagcatttccgacatgtggaccatggtaaaacaaatgacagacgtgttgttgacaccggcaacggatgccctgaagaaccgcagcagcgtggaagtgcgcatggagtttgtcaggcaggccttggcgtaccttgagcagagttataagaattacacccttgtgactgtctttggaaatttgcatcaggcccagctgggcggggtgcctgggacttaccaattggttcgaagtttcctgaacattaaactgccagctcccttgcctggactacaggatggagaggtggaaggccatcctgtgtgggcgctaatttactactgcatgcgctgtggagacctgcttgccgcttcacaggtagttaatcgagcccagcaccagctgggagagtttaaaacctggttccaggagtacatgaacagcaaggacagaagattgtccccagctacggaaaacaagctccggctgcattaccgtagggccctcaggaacaatacagatccctacaagcgggccgtgtactgtatcattggcagatgtgacgtcaccgacaaccagagtgaagtggcggacaaaactgaggattacctgtggctgaagttgaaccaagtgtgttttgacgacgatggcaccagctccccacaagacaggctcactctctcacagttccagaagcagttgttggaagactatggcgagtcccactttacggtgaaccagcaacccttcctctacttccaagtcctgttcctgacagcgcagtttgaagcagcagttgcctttcttttccgcatggagcggctgcgctgccatgctgtccatgtagcactggtgctgtttgagctgaagctgcttttaaagtcctctggacagagtgctcagctcctcagccacgagcctggtgaccctccttgcttgcggcggctgaacttcgtgcggctcctcatgctgtacacccggaagtttgagtccacggacccaagggaggccctccagtacttctatttcctcagggatgagaaagatagtcaaggagaaaacatgtttctgcgctgtgtgagtgagcttgtgattgaaagccgagagttcgatatgattcttgggaaactagagaatgacggaagtagaaagcctggagtcatagataagtttactagtgacacaaagcctattatcaacaaagttgcttctgtggcagaaaataaaggactgtttgaagaggcagcaaagctgtatgaccttgccaagaatgctgacaaggtactggagctgatgaacaaactgctgagccctgtcgtcccccagatcagtgccccgcaatccaacaaggagaggctgaagaacatggcactctccattgccgaacggtatagggctcaaggaataagcgcaaataaatttgtggactccacgttctatcttcttttggacttgatcaccttttttgacgagtatcatagtggtcatattgatagagcttttgatatcattgagcgcttgaagctggtgcccctgaatcaggaaagtgtggaagagagagtggctgctttcagaaatttcagtgatgaaatcaggcacaacctctcagaagtgcttcttgccaccatgaacatcttgttcacacagtttaagaggctcaaggggacaagtccatcctcgtcatccaggccccagcgagtcatcgaggaccgcgactctcaactccgaagtcaagcccgcactctgattacctttgctggaatgataccataccgaacgtctggggacaccaatgcgaggctggtgcagatggaggtcctcatgaattaagtgccatgctttgtgggagtctgggtcggcacactgtcagtacatcaggcacatgggcccactaggctggggtttctggttttgtttctgttgtgttttgttttggtttctgtattatgtatttttgtcaacgccaataaatttctttgatttgt

SEQ ID NO: 210 - DNA, 1435 bp, Homo sapiens
  ref <308>: DATABASE ACCESSION NUMBER: NM_014736
gaaacaccctcggctgggaagtcagttcgttctctcctctcctctcttcttgtttgaacatggtgcggactaaagcagacagtgttccaggcacttacagaaaagtggtggctgctcgagcccccagaaaggtgcttggttcttccacctctgccactaattcgacatcagtttcatcgaggaaagctgaaaataaatatgcaggagggaaccccgtttgcgtgcgcccaactcccaagtggcaaaaaggaattggagaattctttaggttgtcccctaaagattctgaaaaagagaatcagattcctgaagaggcaggaagcagtggcttaggaaaagcaaagagaaaagcatgtcctttgcaacctgatcacacaaatgatgaaaaagaatagaactttctcattcatctttgaataacgtctccttgtttaccctggtattctagaatgtaaatttacataaatgtgtttgttccaattagctttgttgaacaggcatttaattaaaaaatttaggtttaaatttagatgttcaaaagtagttgtgaaatttgagaatttgtaagactaattatggtaacttagcttagtattcaatataatgcattgtttggtttcttttaccaaattaagtgtctagttcttgctaaaatcaagtcattgcattgtgttctaattacaagtatgttgtatttgagatttgcttagattgttgtactgctgccatttttattggtgtttgattattggaatggtgccatattgtcactccttctacttgctttaaaaagcagagttagatttttgcacattaaaaaattcagtattaattaaacattacttattctaccctcttttttggcaaggaggacaaatacgcaatgttggaaaaccttggatggatatcttctctttaaaaaaatgtaaagataatttggtcttgagggtttaaacggttgataatgcctctacaacaacaagaaaaaagataaaatactaggatagaatcatggtgggcacagtggcttctcaggaggctgaggagggaggtttgcttgagtccaggagttggagaccagcccaggcaacatagcgtaaaccctatctctaaaacaatttttagccaggtgcggtggctcacgcctgtaatcccagcactctgggaggccgaggcgggtggatcatgaggtcaggagatcgagaccatcctgcctaacaaggtgaaaccccgtctctactaaaaatacaaaaaattagccgggcgcggtggcgggcgcctgtagtcccagctactcgggaggctgaggcaggagaatggcgtgaacccgggaagtggagcttgcagtgagccgagattgcgccactgcagtcggcagtccggcttgggcgacagagcgagactccgtctcaaaaaaaaaaaaaaaaaaaaaaaa

SEQ ID NO: 211 - DNA, 5426 bp, Homo sapiens
  ref <308>: DATABASE ACCESSION NUMBER: NM_014737
ggggaggaagaaaggcgaaggcaaggcgaaggggtggagagtgatatgaagagcgagagaaaagagaggacagcggacgagcagatccggtatctggaatcccggcgcctagaacgtgtttttcgggagagcaaaggctgtgtctacggcaggctggggatatagcctctccttccgatgaaaagagaaaggaagaatggactacagccaccaaacgtccctagtcccatgtggacaagataaatacatttccaaaaatgaacttctcttgcatctgaagacctacaacttgtactatgaaggccagaatttacagctccggcaccgggaggaagaagacgagttcattgtggaggggctcctgaacatctcctggggcctgcgccggcccattcgcctgcagatgcaggatgacaacgaacgcattcgaccccctccatcctcctcctcctggcactctggctgtaacctgggggctcagggaaccactctgaagcccctgactgtgcccaaagttcagatctcagaggtggatgccccgccggagggtgaccagatgccaagctccacagactccaggggcctgaagcccctgcaggaggacaccccacagctgatgcgcacacgcagtgatgttggggtgcgtcgccgtggcaatgtgaggacgcctagtgaccagcggcgaatcagacgccaccgcttctccatcaacggccatttctacaaccataagacatccgtgttcacaccagcctatggctctgtcaccaacgtccgcatcaacagcaccatgaccaccccacaggtcctgaagctgctgctcaacaaatttaagattgagaattcagcagaggagtttgccttgtacgtggtccatacgagtggtgagaaacagaagctgaaggccaccgattacccgctgattgcccgaatcctccagggcccatgtgagcagatctccaaagtgttcctaatggagaaggaccaggtggaggaagtcacctacgacgtggcccagtatataaagttcgagatgccggtacttaaaagcttcattcagaagctccaggaggaagaagatcgggaagtaaagaagctgatgcgcaagtacaccgtgctccggctaatgattcgacagaggctggaggagatagccgagaccccagcaacaatctgagccatgagaacgaggggatctgggcaccccaggaaccgccattgcccataagacccccaggaagctaggcactttctttccatggaaacatttagacacaaacctccccagctccggccaagccatcatttgctacctggagctggatgtagaagtcagcagacagctccctatccctggacccctgccctccttttttctgctcacaaggacttttgattttagttataaggaggacccaaaatgtgtgtgtgtacatgtgtgtgcacacatggtacgtgtccatgtgcctacctgatactttcacatgtaattaaattccaggcaaccagcacaagagccgtgagcttggcacatgtgctgctcgtgagcaggaaaatcagaggagccactgatctgagtggtatttaggttgaaggaaagatttctcctctcaagtgccagggagcagccacacgtctgtctgtgtttagagagggaagagggttctccaggttcaccatttgggttgtttatatgttggtagaaattctccctgtatgcctagaaggatcagtgaatgtaagagccttggaaattaacaaaataacagccacataaccttgcggcaagtctgatggaaagaaaaagataaaccatccgtggggtagatgcaataagcccacgtatttttacactggaaacgttgattgttttaaatgacaaagacatatgtgatgttctatgtggaaacctgtgaagagtggattctgcctccatctctgcctccatggctacctttaggagacagagaagatcctgtgtgtttctctgtacccagctgacagcctgtctctatggcgcttccttgagtggaaggaaatgtctcaagaaacaaagatctcgctggtgcgtacacagtgctgaccagctagtgtggccagggcctggtggcctggtggccaggaagtttcaggttgaagggaaatgtcgaggctacctgcagatatgacaggtgccttgaacgcagcccatcttcatgtcatcaaaggtcttcctgcacttgaagctggggcgatgtttgcagtcaagaccattctttccaacctctgggttcttgcaagttgccctcaccttgtgtgtggagatgcattccaagaatgaagcctcatcttgctactgagtgtggggttcagggaagctctttaggccacctggtgaaggtgcatggggaggatggagcttctcctcagctcctctgagcagccacctatgtgatctttaaatccaaccccaatgggagaaaagggcaagaacagtctgtgccctgggactcctatcaggaagcttgacaggcagctgggcatcagtgcagctgatatcgtttgaggagggagacagatgcttggacctgggtgcctggctatggagattgaccaagcaagatcaggagctcctgatagcaggcgtctttgagcctagctggggtagaggcactgcccatctcttctccaccttctctccacagaatgtttgcagagctgggcagttgaggaaaggacagcccctggttggtgcctccaaaggaaggtggacttttttggtggagacgtttctgccctgggcaccctcctgcccccgattcatacctatggcttcttgagaaggctcacagctgtggtcttaacgtagactgcagaaagatggcatgcggcccctggcatttcgccaagggttttatagcaagtctccttcctccatagggacagcagcaccagccctgtggggcatggagtggaagcccagaagggcttctgcaagctgcacagaactggggtaagaagacaaagagtagccaccgggagaggcttcctttgttacagctgggaaagaacagttctgtgaatgcaaacacctcctgagttttgcaattgagaaaatgatttggagaacttctcttctggtaatttttattttgaatgttcagggccttagttggccccagtaattctccttggaggacttgggagaagaatttccacaaagcaaactactaaccactagctcttactggacagcgatttctggcttataagagttctctttgatttgcactagcactacgatagtgttagatggggaaatactgcaacatgtccagttggccagatcactttccaagggagcgatactaaggcagactcagctttttaaagatgggaggtcaggaggtggaagtgagaggagatcccatctcacacaacacacttccacgtaatgcagaccacacttttccattttgtcctgccctcttgagaggtcatttctcacgtcctaagaacctgatcagaaattttggaagggttctttgaaatagcagcagttgaaacagagacactttgccacagtgtggagcagattttctcactggtatcacatggtcttgcagttttgaactcttcgaccgatttgtgggagtttatgtaattgcgtgcaatgaacctgaaattgtgtaaaggacaaaagaccagtttatagggttgggttttttttccaacttgtgaaaagcagtttagctgcatctgtctccccaccacccccaccccgggaggggcttatgttacaaggtgatcaagtgaaggaaaaacctgagcctatctggctgggatggtggaattaagcacaaggtcacattctctgtgatcacatgagagggaaggtgatgacttaaatggcagggggtggggattatcttggggagaggctgaaaagcacaaaagatagtcttccctgtacgtattggtgaagaacgtgcacaaggctggatggacttcaacttggagttgagttgaggcaagaggatttctggatattagtcacccatctgcaagaaaaatgctgaggcctcgggtcaagattttgatctgagacatgctgatgcttcaaggagaaatattttcacaatcctctcttccctcaccagaagagaacagtactctctcctagaaacctctaggtaaacacattttatcctaatatcggtagcatataatgccccccccaaaatatctgttttccatgcaaaaaagtctcaacaagaagtctgtggagttgagtggttacttcaaagtgtcaggagagtgaagaaattggccacagaagagcaagaagctctcttaagaaaagggaattctctttaaagaaaccaccaccaacaacaaaacaaccaaaaaccatgttttatgtcaaagctctgtagcacagagaatgtggtgtcacagatacatcgccgagagaggtttctttctttcttttttttttttttgagacagagtctggttctgtttcccaggctggagtgcagtggtgggatctcagctcactgcaacatccgcctctggggttcaagtgattctcctgtctcagcctcccaagtagctggaattacagggacccgccaccacgcccggctaatttttttgtgtggttttagtagaggtggggtttcaccatcttggccaggctggtcttgaactcctgacctcgtgatccacccgcctaggcctcccaaagtgttgggattacaggcgtgagccactgtgcccagccaaaagagaaatttctacatgaacaaggcaatttcagtgtcttacagcggccaaaccatgacgtgaagaatgagataggagacaggagatcaccataagcgtccctgatatagcagcacacattttcacgtttccacttaaatcgttttgcacaaagtcttgcttcgctcagatgagatgagatatgatttcctagagatgtaaaaataagaatgaatgtggcgcccccttcttccagatgtaatagaaagctctgccctatcacaaggggggtgttgaagcgccccttgtgttttaactgtatttaactgagcacaagatgcacaagctgtggtgggaaaccctcagtttacctttggagtcttccctgcagatcgcagacctgtttccaggctgatgtttctggtgtgtaattgctagcgtttctgaagggttttcccaattgttttagccttgtgaagtattcttaattataacttgcctttcagcgatggtacatgacttgattcaacgtttggttctgaacttacacactgatgcgtttactcatctaacataatctgacagggcctcagcaagggagccatacatttttgtaacattttgatatgttttaatgcatctgacttagatcttactgaaataaagcacttttcaaagag

SEQ ID NO: 212 - DNA, 3020 bp, Homo sapiens
  ref <308>: DATABASE ACCESSION NUMBER: NM_014773
cgcggcggcctttctagccgctgtcccaagggttggtctcgcgctttcggctgcgagctctctgtggtgctggcagcgacatgtggcgcctcccgggactcctgggccgagctcttccccgtacactgggacctagcctctggagggtgactcctaagtccaccagcccagatgggcctcagactacctcctccactttgctggttcctgtgcctaacctcgacaggtcaggtccccatggcccaggcacgagcgggggtccaaggtcccatggatggaaggatgccttccaatggatgtcttcccgtgtctccccgaacaccctatgggatgccatatcttggggcactctggccgtgctggccctgcagctggcaaggcagatccacttccaggcatccctgccagcaggacctcagcgggtagaacactgctcctggcacagtcccctggaccgtttcttctcatctcccttgtggcacccatgctcctcactgcgacaacacatcctccccagccccgatggcccagctcccaggcacactggcctcagggaacccaggcttggccaggaagaagcctcagctcagccccggaacttctcacacaactctttgagaggagctcgtcctcaggacccctctgaggaaggtcccggtgattttggcttcctgcatgccagtagtagcatcgagtccgaggcaaaaccagcccagcctcagcccactggtgaaaaggaacaagataaatcaaaaactctttcccttgaggaggctgtgacttccattcagcagctcttccagctcagtgtttccatcgctttcaacttcctgggaacagagaacatgaagagtggcgaccacacggcagccttttcttacttccagaaagctgcagcccgcggctacagcaaagcgcagtacaatgcgggcttgtgtcatgagcatggcagaggcacccccagggacattagcaaggcggtcctttattatcagttggctgccagccagggccacagcctggctcagtaccgctatgccaggtgcctactacgagacccagcctcttcgtggaaccctgagcggcagagggcagtgtccttgctgaagcaggctgcagactcaggcttgagagaggcccaagctttcctcggggtgcttttcaccaaggagccctacctggatgagcagagagctgtgaaatatctttggcttgcagccaacaatggggactcacagagcaggtaccaccttggaatttgctatgagaaaggccttggtgtgcagaggaatctgggagaggccttgagatgttaccagcagtcagccgctctgggaaatgaggccgcccaggagaggctgcgagccctcttttccatgggggctgcagccccggggcccagcgacctgacagttacaggactgaagtctttctccagcccctccctctgcagcttgaacaccctgctagcaggaacctcacgcctaccacatgcctcgagcacaggcaaccttggcctcctctgcagaagtgggcatctcggagccagcctggaagcctccagcagggctattcccccacacccctacccactggaaaggagtgttgtaagactaggttttggctaaggtgagataaaacatagtccctggtgcctcttaggggccagagcgggcaggaggttggataacaaaaatagagcatcagcaaccctttccaggtagaaattccagcgggagttcaggttcccaagcaatttcacgtacatggctggtaagtgactgatctttccccccgcttggtagcctcacagatgagtcttggatgcattcacagtcatttctggtctgtgcaccaaaggatgcattcagtgacctatgaaaaaccctactgaagggtccagagaccctggtgctcaccttagcctttgtctttgagcaaataacttaccttcttccttcttatgcctgggttttctcacacttaaatctgtactactgtttgccaatgtctgatgtgtgtatccctggttcacaagaagattttagatggtattcaaattaatattttctatttagttatatatttaatgtataatataaaaatatgattagcatattgacctgtagtttgatagatgttctgtctaggataaagctaactgtaaaaaaaaatagtgaatcagtttaaagaaaaacataacgtaaaagtgggcacagatccagagaggtagcaaaaatcacaggggtggttccatgaatggctgacacttaggaaactctgaattaggccatcctcgagactagcccaccattcacctctgttcatcccccgtgggctcataatcgttttcatttcacctttgatttggaaggaagaagtttcttgcccaaatgcctggatgtgtctgcttgactttcagaacttctcacctcagccctaaagagggagcctgtgggttctcagagagatatcacaatttgagtcccaaagaagaggccagatacccacccaccttcccccaaatcttaagcacctgcgccagtacagtcaagaagaggaaagtgtgtgaagacccaggtctggctctgccacttgcctggccatgtcaccttgaagctgtgacctgactccctatattgtttcctcagttgtagaccaaaggcaatggtgtctgccctcctaccttagaagacaaatgcaagggcatttcaccacagagaggacctttgtgctcactttggcccaggaggcagtgatgctcatggttgcatgactttatgagtcgctgggccagggtgaggacctgggcctcctgactcctggcccagagttcttgtccatcagttcatactgcaattttatgtgaaagcattatgactgtcctacccatgggagagtaaatgtagattgaatgctaggagtcttaaagctggagagtatagattttgaggtccccatttgggaaacatgtgccagaaatgtctaggtgtttaataaaacagatattggattatctc

SEQ ID NO: 213 - DNA, 2470 bp, Homo sapiens
  ref <308>: DATABASE ACCESSION NUMBER: NM_014791
ttggcgggcggaagcggccacaacccggcgatcgaaaagattcttaggaacgccgtaccagccgcgtctctcaggacagcaggcccctgtccttctgtcgggcgccgctcagccgtgccctccgcccctcaggttctttttctaattccaaataaacttgcaagaggactatgaaagattatgatgaacttctcaaatattatgaattacatgaaactattgggacaggtggctttgcaaaggtcaaacttgcctgccatatccttactggagagatggtagctataaaaatcatggataaaaacacactagggagtgatttgccccggatcaaaacggagattgaggccttgaagaacctgagacatcagcatatatgtcaactctaccatgtgctagagacagccaacaaaatattcatggttcttgagtactgccctggaggagagctgtttgactatataatttcccaggatcgcctgtcagaagaggagacccgggttgtcttccgtcagatagtatctgctgttgcttatgtgcacagccagggctatgctcacagggacctcaagccagaaaatttgctgtttgatgaatatcataaattaaagctgattgactttggtctctgtgcaaaacccaagggtaacaaggattaccatctacagacatgctgtgggagtctggcttatgcagcacctgagttaatacaaggcaaatcatatcttggatcagaggcagatgtttggagcatgggcatactgttatatgttcttatgtgtggatttctaccatttgatgatgataatgtaatggctttatacaagaagattatgagaggaaaatatgatgttcccaagtggctctctcccagtagcattctgcttcttcaacaaatgctgcaggtggacccaaagaaacggatttctatgaaaaatctattgaaccatccctggatcatgcaagattacaactatcctgttgagtggcaaagcaagaatccttttattcacctcgatgatgattgcgtaacagaactttctgtacatcacagaaacaacaggcaaacaatggaggatttaatttcactgtggcagtatgatcacctcacggctacctatcttctgcttctagccaagaaggctcggggaaaaccagttcgtttaaggctttcttctttctcctgtggacaagccagtgctaccccattcacagacatcaagtcaaataattggagtctggaagatgtgaccgcaagtgataaaaattatgtggcgggattaatagactatgattggtgtgaagatgatttatcaacaggtgctgctactccccgaacatcacagtttaccaagtactggacagaatcaaatggggtggaatctaaatcattaactccagccttatgcagaacacctgcaaataaattaaagaacaaagaaaatgtatatactcctaagtctgctgtaaagaatgaagagtactttatgtttcctgagccaaagactccagttaataagaaccagcataagagagaaatactcactacgccaaatcgttacactacaccctcaaaagctagaaaccagtgcctgaaagaaactccaattaaaataccagtaaattcaacaggaacagacaagttaatgacaggtgtcattagccctgagaggcggtgccgctcagtggaattggatctcaaccaagcacatatggaggagactccaaaaagaaagggagccaaagtgtttgggagccttgaaagggggttggataaggttatcactgtgctcaccaggagcaaaaggaagggttctgccagagacgggcccagaagactaaagcttcactataatgtgactacaactagattagtgaatccagatcaactgttgaatgaaataatgtctattcttccaaagaagcatgttgactttgtacaaaagggttatacactgaagtgtcaaacacagtcagattttgggaaagtgacaatgcaatttgaattagaagtgtgccagcttcaaaaacccgatgtggtgggtatcaggaggcagcggcttaagggcgatgcctgggtttacaaaagattagtggaagacatcctatctagctgcaaggtataattgatggattcttccatcctgccggatgagtgtgggtgtgatacagcctacataaagactgttatgatcgctttgattttaaagttcattggaactaccaacttgtttctaaagagctatcttaagaccaatatctctttgtttttaaacaaaagatattattttgtgtatgaatctaaatcaagcccatctgtcattatgttactgtcttttttaatcatgtggttttgtatattaataattgttgactttcttagattcacttccatatgtgaatgtaagctcttaactatgtctctttgtaatgtgtaatttctttctgaaataaaaccatttgtgaatat

SEQ ID NO: 214 - DNA, 4281 bp, Homo sapiens
  ref <308>: DATABASE ACCESSION NUMBER: NM_014926
ctgatggatttgcattcaggttccagccctgcgtttcctatattgactccttatacacgacctggcgctccagtttaggaggagacgttgttttgtaatcaaccacgaacgatgaaaccttccatagctgagatgcttcacagaggaaggatgttgtggataattcttctaagcacaattgctctaggatggactaccccgattcccctaatagaggactcagaggaaatagatgagccctgttttgatccatgctactgtgaagttaaagaaagcctctttcatatacattgtgacagtaaaggatttacaaatattagtcagattaccgagttctggtcaagaccttttaaactgtatctgcagaggaattctatgaggaaattatataccaacagttttcttcatttgaataatgctgtgtctattaatcttgggaacaatgcattgcaggacattcagactggagctttcaatggtcttaagattttaaagagactatatctacatgaaaacaaactagatgtcttcagaaatgacaccttccttggcttggaaagtctagaatatctgcaggcagattacaatgtcattaaacgtattgagagtggggcatttcggaacctaagtaaattgagggttctgattttaaatgataatctcatccccatgcttccaaccaatttatttaaggctgtctctttaacccatttggacctacgtggaaataggttaaaggttcttttttaccgaggaatgctagatcacattggcagaagcctgatggagctccagctggaagaaaacccttggaactgtacatgtgaaattgtacaactgaagagttggctggaacgcattccttatactgccctggtgggagacattacctgtgagacccctttccacttccatggaaaggacctacgagaaatcaggaagacagaactctgtcccttgttgtctgactctgaggtagaggctagtttgggaattccacattcgtcatcaagtaaggagaatgcatggccaactaagccttcctcaatgctatcctctgttcattttactgcttcttctgtcgaatacaagtcctcaaataaacagcctaagcccaccaaacagcctcgaacaccaaggccaccctccacctcccaagctttatatcctggtccaaaccagcctcccattgctccttatcagaccagaccaccaatccccattatatgccccactgggtgtacctgtaatttgcacatcaatgaccttggcttgactgtcaactgcaaagagcgaggatttaataacatttctgaacttcttccaaggcccttgaatgccaagaaactgtatctgagtagcaatctgattcagaaaatataccgttctgatttttggaatttttcttccttggatctcttgcatctggggaacaatcgtatttcctatgtccaagatggggcctttatcaacttgcccaacttaaagagcctcttccttaatggcaacgatatagagaagctgacaccaggcatgttccgaggcctacagagtttgcactacttgtactttgagttcaatgtcatccgggaaatccagcctgcagccttcagcctcatgcccaacttgaagctgctattcctcaataataacttactgaggactctgccaacagacgcctttgctggcacatccctggcccggctcaacctgaggaagaactacttcctctatcttcccgtggctggtgtcctggaacacttgaatgccattgtccagatagacctcaatgagaatccttgggactgcacctgtgacctggtcccctttaaacagtggatcgaaaccatcagctcagtcagtgtggttggtgatgtgctttgcaggagccctgagaacctcacgcaccgtgatgtgcgcactattgagctggaagttctttgcccagagatgctgcacgttgcaccagctggagaatccccagcccagcctggagattctcaccttattggggcaccaaccagtgcatcaccttatgagttttctcctcctgggggccctgtgccactttctgtgttaattctcagcctgctggttctgtttttctcagcagtctttgttgctgcaggcctctttgcctacgtgctccgaaggcgtcgaaagaagctgcccttcagaagcaagcggcaggaaggtgtggaccttactggcatccaaatgcaatgccacaggctgtttgaggatggtggaggtggtggtggcggaagtgggggtggtggtcgaccaactctttcctctccagagaaggcccctcccgtgggtcatgtgtatgagtacatcccccacccggttacccaaatgtgcaacaaccccatctacaagcctcgtgaggaggaggaggtggctgtttcatcagcccaagaagcagggagtgcagaacgtgggggtccagggacacaaccaccgggaatgggtgaggctctcctaggaagtgagcagtttgctgagacacccaaggagaaccatagtaactaccggaccttgctggaaaaagagaaggagtgggccctagcagtgtccagctcccagcttaacaccatagtgacggtgaatcaccatcaccctcaccacccagcagttggtggggtttcaggagtagttgggggaactgggggagacttggcagggttccgccaccatgagaaaaatggtggggtggtgctgtttcctcctgggggaggctgtggtagtggcagtatgctactagatcgagagaggccacagcctgccccctgcacagtgggatttgtggactgtctctatggaacagtgcccaaattaaaggaactgcacgtgcaccctcctggcatgcaatacccagacttacagcaggatgccaggctcaaagaaacccttctcttctcggctggaaagggcttcacagaccaccaaacccaaaaaagtgattacctcgagttaagggccaaacttcaaaccaagccggattacctcgaagtcctggagaagacaacatacaggttctaacagagagaagaaaatatattagtgctttttttttttcaaaagaaaaggaaaataaaagaaatatatcccttgctccctttacacttgtcccagtaactccatcctcacgatctttcctaccctgaacaaaactaaaaccgcatgataactagagaatacagatgtatgctctcccctctcagatgcgatttggaggaagggccatactcagatcattaatcaatgaaagtgccttcgcagacttttgccagcaaatgttatcattatttttttatactgaaacttgagactttgactgtgccatgtataagatatactggggatcattgtatggatcctaattaagtaaaattcaatgtgtctttttattttcagtaactattttttttatagttgtagttttgatttaaagggggggaaacaagttgacatttgtcatttgtggctttctttcttatcatcatggcacagattctgtacatgtattaacaatgcagtttgctgcatgcctggaaactgcaagatggggagggagggggcgggtcttgctcgaatgttctcactcactatcttgtctctcatacacatatccatctgcagaccatggtccctaaacctgcagtttcttcctgctggtgcaggtacacacacacacacacacacacacacacacacacacacacactccataccatttccattcaactcaatctgcttagttcgggtttgatccatttttctcctctccatagttctaccacccttcactgctagtgtacagctcacagcatctctcctaccaccctgggaaaagtcacattctaggctggattctactgaagtagaggcctggtggtttaacagccgaagacacacgcctagggatgagcaccctctttgtgacacttcatcctgatgccaagattttttggagaacatctgcactttcttatatatatatataatattaaaaaaagcaactgggtatatatcactaacagctttgtaggaagcacttttaatgttttctctctcacacacaaagattcaaaagaaatgtgcatatatttattctgtaatttcagtgattataaattgtaaaggtaatgtttaatcattgtatagtgattatgcctctggtatagctttcctaataaaaagtttttgaaaaacataaaaaaaaaaaaaaaaaaaaaaaaaaaaaaaaaaaaaaaaaaaaaaaaaaaaaaaaaaaaa

SEQ ID NO: 215 - DNA, 1560 bp, Homo sapiens
  ref <308>: DATABASE ACCESSION NUMBER: NM_015544
ggcaggcccgcgcccgcgcccggactttgccatcggcggggcagtcgcgggatgcgcccgggagccacagcctgaggccctcaggtctctgcaggtgtcgtggaggaacctagcacctgccatcctcttccccaatttgccacttccagcagctttagcccatgaggaggatgtgaccgggactgagtcaggagccctctggaagcatggagactgtggtgattgttgccataggtgtcctggccaccatctttctggcttcgtttgcagccttggtgctggtttgcaggcagcgctactgccggccgcgagacctgctgcagcgctatgattctaagcccattgtggacctcattggtgccatggagacccagtctgagccctctgagttagaactggacgatgtcgttatcaccaacccccacattgaggccattctggagaatgaagactggatcgaagatgcctcgggtctcatgtcccactgcattgccatcttgaagatttgtcacactccgacagagaagcttgttgccatgacaatgggctctggggccaagatgaagacttcagccagtgtcagcgacatcattgtggtggccaagcggatcagccccagggtggatgatgttgtgaagtcgatgtaccctccgttggaccccaaactcctggacgcacggacgactgccctgctcctgtctgtcagtcacctggtgctggtgacaaggaatgcctgccatctgacgggaggcctggactggattgaccagtctctgtcggctgctgaggagcgtttggaagtccttcgagaagcagccctagcttctgagccagataaaggcctcccaggccctgaaggcttcctgcaggagcagtctgcaatttagtgcctacaggccagcagctagccatgaaggcccctgccgccatccctggatggctcagcttagccttctactttttcctatagagttagttgttctccacggctggagagttcagctgtgtgtgcatagtaaagcaggagatccccgtcagtttatgcctcttttgcagttgcaaactgtggctggtgagtggcagtctaatactacagttaggggagatgccattcactctctgcaagaggagtattgaaaactggtggactgtcagctttatttagctcacctagtgttttcaagaaaattgagccaccgtctaagaaatcaagaggtttcacattaaaattagaatttctggcctctctcgatcggtcagaatgtgtggcaattctgatctgcattttcagaagaggacaatcaattgaaactaagtaggggtttcttcttttggcaagacttgtactctctcacctggcctgtttcatttatttgtattatctgcctggtccctgaggcgtctgggtctctcctctcccttgcaggtttgggtttgaagctgaggaactacaaagttgatgatttcttttttatctttatgcctgcaattttacctagctaccactaggtggatagtaaatttatacttatgtttccctaaaaaaaaaaaaaaaaaaaa

SEQ ID NO: 216 - DNA, 1610 bp, Homo sapiens
  ref <308>: DATABASE ACCESSION NUMBER: NM_015710
ggcacgagggagagaactagtctcgagtttttttttttttttttttgacaagatggcggcaggaggcagtggcgttggtgggaagcgcagctcgaaaagcgatgccgattctggtttcctggggctgcggcccacttcggtggacccagcgctgaggcggcggcggcgaggcccaagaaataagaagcggggctggcggcggcttgctcaggagccgctggggctggaggttgaccagttcctggaagacgtgcggctacaggagcgcacgagcggtggcttgttgtcagaggccccaaatgaaaaactcttcttcgtggacactggctccaaggaaaaagggctgacaaagaagagaaccaaagtccagaagaagtcactgcttctcaagaaaccccttcgggttgacctcatcctcgagaacacatccaaagtccctgcccccaaagacgtcctcgcccaccaggtccccaacgccaagaagctcaggcggaaggagcagctatgggagaagctggccaagcagggcgagctgccccgggaggtgcgcagggcccaggcccggctcctcaacccttctgcaacaagggccaagcccgggccccaggacaccgtagagcggcccttctacgacctctgggcctcagacaaccccctggacaggccgttggttggccaggatgagtttttcctggagcagaccaagaagaaaggagtgaagcggccagcacgcctgcacaccaagccgtcccaggcgcccgccgtggaggtggcgcctgccggagcttcctacaatccatcctttgaagaccaccagaccctgctctcagcggcccacgaggtggagttgcagcggcagaaggaggcggagaagctggagcggcagctggccctgcccgccacggagcaggccgccacccaggagtccacattccaggagctgtgcgaggggctgctggaggagtcggatggtgagggggagccaggccagggcgaggggccggaggctggggatgccgaggtctgtcccacgcccgcccgcctggccaccacagagaagaagacggagcagcagcggcggcgggagaaggctgtgcacaggctgcgggtacagcaggccgcgttgcgggccgcccggctccggcaccaggagctgttccggctgcgcgggatcaaggcccaggtggccctgaggctggcggagctggcgcggcggcggaggcggcggcaggcgcggcgggaggctgaggctgacaagccccgaaggctgggacggctcaagtaccaggcacctgacatcgacgtgcagctgagctcggagctgacagactcgctcaggaccctgaagcccgagggcaacatccttcgagaccggttcaagagcttccagaggaggaatatgatcgagcctcgagagagagccaagttcaaacgcaagtacaaggtgaagctggtggagaagcgggcgttccgtgagatccagttgtagctgccatcagatgccggagactcgcccttcaataaaaaatctcttctagctgaaaaaaaaaaaaaaaaaaaaaaaaaaaaaaaaaaaaaaaaaaaaaaaaaaaaaaaaaaaaaaaaaaaaa

SEQ ID NO: 217 - DNA, 600 bp, Homo sapiens
  ref <308>: DATABASE ACCESSION NUMBER: NM_015969
agtcttggcggaggtgaccaaagccacgtaatgtccgtagttcgctcatccgtccatgccagatggattgtggggaaggtgattgggacaaaaatgcaaaagactgctaaagtgagagtgaccaggcttgttctggatccctatttattaaagtattttaataagcggaaaacctactttgctcacgatgcccttcagcagtgcacagttggggatattgtgcttctcagagctttacctgttccacgagcaaagcatgtgaaacatgaactggctgagatcgttttcaaagttggaaaagtcatagatccagtgacaggaaagccctgtgctggaactacctacctggagagtccgttgagttcggaaaccacccagctaagcaaaaatctggaagaactcaatatctcttcagcacagtgaagcgggagtggaagaaggatctaaagggaaaaactgacatgtttatgttatggaaaaagaaatttttctaagtttcatcacaaactgtgtccagtttctctgtggtgtttatgaaatagctaaaagcaaatgaagtaaagggcatactatggtttttcacaaaaaaaaaaaaaaaaa

SEQ ID NO: 218 - DNA, 1587 bp, Homo sapiens
  ref <308>: DATABASE ACCESSION NUMBER: NM_015982
gccggggggaggggccggggcggtggcggctgtggccggtactggacccggcgggatgagcgaggtggaggcggcagcggtggctacagcggtccccgcggcgacggtgcccgcgacggcggcaggggtggtagcggtggtggtaccggtgcccgcaggggagccgcagaaaggcggcggggcgggcggcgggggcggagccgcctcgggccccgctgctgggaccccctcggcgccgggctcccgcacccctggcaatccggcgacggcggtctcgggaacccccgcccccccggcccggagtcaggcggacaagccggtgctggcaatccaagtcctgggcactgtcaaatggttcaacgtccggaatggttacggattcatcaacaggaatgacaccaaggaagatgtctttgttcaccagacagctattaaaagaaacaaccccaggaagtttctgcgcagcgttggagatggggagactgtggaatttgatgtcgtggaaggagagaagggcgcagaagccactaatgtaactgggcctgggggagtacccgtgaagggcagccgttatgcccccaaccgacgtaagtcccgccgattcatcccccggcctccctcagttgccccaccacccatggtggcagagatcccctcggcggggacaggacctggcagtaaaggggagcgggctgaagactctgggcaacggccccgacgatggtgccccccacccttcttctaccgacggcggtttgtgcgaggcccccggcctcccaaccagcagcagcctatagagggcactgacagggtagaacccaaagagacagccccattggaggggcaccaacagcagggagatgagcgagtccccccgcccagattccggcccaggtaccgaaggcctttccgccccaggccacgccagcagcctaccacagaaggtggggatggtgagaccaagcccagccaaggtcccgctgatggttcccggcctgagccccagcgcccacgaaaccgcccctacttccagcggagacggcagcaggcccctggcccccagcaggcccctggcccccggcagcccgcagcccctgagacctcagcccctgtcaacagtggggaccccaccaccaccatcctggagtgattccaactcaactcaaaggacacccagagctgccatctggtatctgccagtttttccaaatgacctgtaccctacccagtaccctgctccccctttcccataattcatgacatcaaaacaccagcttttcaccttttccttgagactcaggaggaccaaagcagcagccttttgctttttcttttttcttccctccccttatcaagggttgaaggaagggagccatccttactgttcagagacagcaactccctcccgtaactcaggctgagaaggaaccagccagctcttacctcctcctggttgcttttcttgcccccaccccaagtttatttttgttttcccccggccccctacctctgaagccattttatgatctgtcatgtgccacctgagcctccagtaaaaacaaaaacaggccaaaaaaaaaaaaaaaa

SEQ ID NO: 219 - DNA, 1199 bp, Homo sapiens
  ref <308>: DATABASE ACCESSION NUMBER: NM_015987
tagccccgcctctcgcctcgccgcctcgccgtcccgccgccttgccgccctgccaccctgccgccctgccgccctgccgccctgccgccctgccgccctgccgccctgccgccggtggtcgctgcccgtggtgctccgtcgcccccgccacctcacgtcctcccgtgcgtcgggagcgtctcggctacaacatgttgggcatgatcaagaactcgctgttcggaagcgtagagacgtggccttggcaggtcctaagcaaaggggacaaggaagaagttgcctatgaagaaagggcctgtgaaggcggcaaatttgccacagtagaagtgacagataagcctgtggatgaggctctacgggaagcaatgcccaaggtcgcaaagtatgcggggggcaccaatgacaagggaattgggatggggatgacagtccctatttcctttgctgtgttccccaatgaagatggctctctgcagaagaaattaaaagtctggttccggattccaaaccaatttcaaagcgacccaccagctcccagtgacaaaagcgttaagattgaggaacgggaaggcatcactgtctattccatgcagtttggtggttatgccaaggaagcagactacgtagcacaagccacccgtctgcgtgctgccctggagggcacagccacctaccggggggacatctacttctgcacgggttatgaccctcccatgaagccctacggacggcgcaatgagatctggctgttgaagacatgagtgacccactgaaccaagaacttactggaagtgtgcctctgtgtctccttcctcgggggtaaggaggggacagtgcttcccaagttccagctgcaagtccaacttaaccaactttccttcaaagtcagttactgccaattttctgaaaaaagcatgttccatatactaagtctcttttctcacggtaggaaataatacagccaagatatgcagcatccttctcattgatgtagaaaattctgcgatagaccagaaaaatcctggcagcttttctccaggcatctgggtcactaaaaactgattttctaaaattattggatttgtattttgttattaagggggaaaatgtgatttgtgcctgatctttcatctgtgattcttataagagctttgtcttcagaaaaactaaaaataaaaggcattgacttaaacagctga

SEQ ID NO: 220 - DNA, 896 bp, Homo sapiens
  ref <308>: DATABASE ACCESSION NUMBER: NM_016049
gtcgcggccgccagctaggggcgcgggaaggcggggctcggatgcaatcgggacctcctcctggactgggccgggggcggactccgggacccagggcgccgggagccggcgggctacctgcgagtcgagttagcgttgtcgccgaaccgaagcctcgctcgccatgggggaggtggagatctcggccctggcctacgtgaagatgtgcctgcatgctgcccggtacccacacgccgcagtcaacgggctgtttttggcgccagcgccgcggtctggagaatgcctgtgcctcaccgactgtgtgcccctcttccacagccacctggccctgtccgtcatgttggaggtcgccctcaaccaggtggatgtgtggggagcacaggccggtctggtggtggctggttactaccatgccaatgcagctgtgaacgatcagagccctgggcccctggccttgaaaattgctgggcgaattgcagaattcttccctgatgcagtacttattatgttggataatcagaaactggtgcctcagcctcgtgtgcccccggtcatcgtcctggagaaccaaggtctccgctgggtccctaaggataagaacttagtgatgtggagggactgggaagagtcacggcagatggtgggagctctactggaagatcgggcccaccagcaccttgtggactttgactgccaccttgatgacatccggcaggactggaccaaccagcggctcaacactcaaatcacccagtgggttggtcccactaatggaaatggaaatgcctgagccagggccagcggggcccggttccaataaagagacttgggctgaaaaaaaaaaaaaaaaaaaaaaaaaaaaaaaaaaaaaaaaaaaaaaaaaaaaaaaaaaaaaa

SEQ ID NO: 221 - DNA, 2175 bp, Homo sapiens
  Modified_base 1 ... 2175: n = a,c,g, or t
  ref <308>: DATABASE ACCESSION NUMBER: NM_016101
ggccattacggccgggagactattgggcgctagcgagacgaactattggtacggggctagagaggaaggctttgggattgccggggagcagcgagcgaccgacttccgtttccagttaccaaggcacgaggatccggtgttccaacccagggggaaaaatgcggcctttgactgaagaggagacccgtgtcatgtttgagaagatagcgaagtacattggggagaatcttcaactgctggtggaccggcccgatggcacctactgtttccgtctgcacaacgaccgggtgtactatgtgagtgagaagattatgaagctggccgccaatatttccggggacaagctggtgtcgctggggacctgctttggaaaattcactaaaacccacaagtttcggttgcacgtcacagctctggattaccttgcaccttatgccaagtataaagtttggataaagcctggtgcagagcagtccttcctgtatgggaaccatgtgttgaaatctggtctgggtcgaatcactgaaaatacttctcagtaccagggcgtggtggtgtactccatggcagacatccctttgggttttggggtggcagccaaatctacacaagactgcagaaaagtagaccccatggcgattgtggtatttcatcaagcagacattggggaatatgtgcggcatgaagagacgttgacttaaaacgaagcccattccaaggacagacgggctgtatggaaaggccgagctttgtttcctgtgtttgtgtggactccaccatcatgttgaattttgtnaacactctggcctcttcagggacttcttatttactgtactctctatcactgacaaatgcaggctggattcttattatatacagagatggctcaaaaatggggtttcagatctttgtgacgaaatagaatactgtttcatatttgaatcagagggcttcttgttctgagaaataggttcaaaatcattggaaccaggaacaagaatagctatttgttatctgtgataacactgttttctaaacacaaggattttcttttttattaatatgcaacatagacattgccataacagaataataaaccacatgtggggttttaaaaatgaaatttggctaataggagcaattcagctatttttctatacagtaattggtgtgtggtatagaagaaaaacgggttcaaaccccacttctgccacctaccagctatatggccttgaatgagtcattcagcttttaataaggttcattttcttctgtttaaaaagacncaaaacttgaaaatcagctttggccatctacctgagaattagaaagtcttgatttttggaattagaaatcatgattgaggctgggcncagtggctcgcgcctgtaatcccagcactttggaggccaagcggccggatcacttnaggttagnagtttnagacnagcctggccaacatggtgaaaccccatttctactaaaaaaaaaaaaaaattaggtgtggtgacacatggctgtggtcctagttacttgggaggctgaggcaggagaatggcttgaactggggaagcagagcttgcagtgagccaagatggtgccattacactccagcctgggcgtgacagagtgagactccatctgattgtaaagcatctagtacagtgtacagtgccttggaaatgataggtatggaataaatggtaattatttttatattatatatattatgtattcctgttattaagtgtagagttttatgagtataatttgattttattaccttcttttttacaagctgttttctcagtatttttcttggatgggatgacgtctaggntggaaagtttttttcatcactatgattttataaaacaattttttctatgaacctttacttacttgactggattggactaaaagcactgatcagaggccacgacataaaaattcagtccctttgtccttccccgtgcctcccaaagttactttaagatccttagaatatttctttaaatattttatagacaaaaaatttaaagactatctgtattgcaaaattaaactatttctttaatgaatatattgcttattttaagttccaaaggtgaagtctttaagaataaaacattaccaactcctacaaaaaaaaaaaaaaaaaaaaaaaaaaaacat

SEQ ID NO: 222 - DNA, 2024 bp, Homo sapiens
  ref <308>: DATABASE ACCESSION NUMBER: NM_016250
cgggacgcagcaaagagaggagagaccccaagtcagaaggagtgagaaccctgacccctaatcccactgcatccagccaataggagcccagccaccatggcggagctgcaggaggtgcagatcacagaggagaagccactgttgccaggacagacgcctgaggcggccaagactcactctgtggagacaccatacggctctgtcactttcactgtctatggcacccccaaacccaaacgcccagcgatccttacctaccacgatgtgggactcaactataaatcttgcttccagccactgtttcagttcgaggacatgcaggaaatcattcagaactttgtgcgggttcatgtggatgcccctggaatggaagagggagcccctgtgttccctttgggatatcagtacccatctctggaccagcttgcagacatgatcccttgcgtcctgcagtacctaaatttctctacaataattggagttggtgttggagctggagcctacatcctggcgagatatgctcttaaccacccggacactgttgaaggtcttgtcctcatcaacattgatcccaatgccaagggttggatggattgggcagcccacaagctaacaggcctcacctcttccattccggagatgatccttggacatcttttcagccaggaagagctctctggaaattctgagttgatacaaaagtacagaaatatcattacacatgcacccaacctggataacattgaattgtactggaacagctacaacaaccgccgagacctgaactttgagcgtggaggtgatatcaccctcaggtgtcctgtgatgctggtggtaggagaccaagcacctcatgaagatgcagtggtggaatgtaactcaaaactggaccccacccagacctcgttcctcaagatggctgactccggaggtcagccccagctgactcagccaggcaagctgaccgaggccttcaagtacttcctgcaaggcatgggctacatggcctcatcctgcatgactcgcctgtcccggtctcgtacagcctctctgaccagtgcagcatccgttgatggcaaccggtcccgctctcgcaccctgtcccagagcagcgagtctggaactctttcttcggggcccccggggcacaccatggaggtctcctgttgaatggcccttgttgccctagagtgggacccagccctcacctcccccagagctaacctgggaggtgctgaaggggcattgggccaccgtaagcaagggaaaaagggcagatcatgcggggagatgaccttgatctttgattgctaccctaaccttgacctttaacccgtgattccccccagctcctggaagagatgtcctaatatctcttagggacccagacccctaaattctcctcctcccccattttgatgttaaggtggagagggcatatgcatcctctgtcctgatctaggtgtctatagctgaggggtaagaggttgttgtagttgtcctggtgcctccatcagactctccctacttgtcccatatttgcaaggggaggggatttggggctggggctccattcaccaaagctgaggtggcttctcattaaccccttaggactctgaagggtatggacctacgtgaatgtgtgtcagggggagacttgctggtgggttagtggtcctcaggatgtgataaaaacatccagtgtaaaaaggaagttggaatgggagttggcgggcagtgaacgagtgtggggaaggattggtgctggggcaacaggaaggggcctggggccgtttggctgcactaactttggtagctcagtgtgcatctaaagtgggactggggagggagctaagcttgggctgggctgcttggggcttggcatagggtggaaagggctaccctggggcttctgacccccctgtagtatgtgtggagggtgccctcccgtctcccacaacttctgctataacaataaactgtagaggaatcggaaaaaaaaaaaaaaaaaaaaaaaaaaaaaa

SEQ ID NO: 223 - DNA, 2268 bp, Homo sapiens
  Modified_base 1 ... 2268: n = a,c,g, or t
  ref <308>: DATABASE ACCESSION NUMBER: NM_016359
gggatttgaaccncgctgacgaagtttggtgatccatcttccgagtatcgccgggatttcgaatcgcgatgatcatcccctctctagaggagctggactccctcaagtacagtgacctgcagaacttagccaagagtctgggtctccgggccaacctgagggcaaccaagttgttaaaagccttgaaaggctacattaaacatgaggcaagaaaaggaaatgagaatcaggatgaaagtcaaacttctgcatcctcttgtgatgagactgagatacagatcagcaaccaggaagaagctgagagacagccacttggccatgtcaccaaaacaaggagaaggtgcaagactgtccgtgtggaccctgactcacagcagaatcattcagagataaaaataagtaatcccactgaattccagaatcatgaaaagcaggaaagccaggatctcagagctactgcaaaagttccttctccaccagacgagcaccaagaagctgagaatgctgtttcctcaggtaacagagattcaaaggtaccttcagaaggaaagaaatctctctacacagatgagtcatccaaacctggaaaaaataaaagaactgcaatcactactccaaactttaagaagcttcatgaagctcattttaaggaaatggagtccattgatcaatatattgagagaaaaagaaacattttgaagaacacaattccatgaatgaactgaagcagcagcccatcaataagggaggggtcaggactccagtacctccaagaggaagactctctgtggcttctactcccatcagccaacgacgctcgcaaggccggtcttgtggccctgcaagtcagagtaccttgggtctgaaggggtcactcaagcgctctgctatctctgcagctaaaacgggtgtcaggttttcagctgctactaaagataatgagcataagcgttcactgaccaagactccagccagaaagtctgcacatgtgaccgtgtctgggggcaccccaaaaggcgaggctgtgcttgggacacacaaattaaagaccatcacggggaattctgctgctgttattaccccattcaagttgacaactgaggcaacgcagactccagtctccaataagaaaccagtgtttgatcttaaagcaagtttgtctcgtcccctcaactatgaaccacacaaaggaaagctaaaaccatgggggcaatctaaagaaaataattatctaaatcaacatgtcaacagaattaacttctacaagaaaacttacaaacaaccccatctccagacaaaggaagagcaacggaagaaacgcgagcaagaacgaaaggagaagaaagcaaaggttttgggaatgcgaaggggcctcattttggctgaagattaataattttttaatatcttgtaaatattcctgtattctcaacttttttccttttgtaaatttttttttttttgctgtcatccccactttagtcacgagatctttttctgctaactgttcatagtctgtgtagtgtccatgggttcttcatgtgctatgatctctgaaaagacgttatcaccttaaagctcaaattctttgggatggtttttacttaagtccattaacaattcaggtttctaacgagacccatcctaaaattctgtttctagatttttaatgtcaagttcccaagttccccctgctggttctaatattaacagaactgcagtcttctgctagccaatagcatttacctgatggcagctagttatgcaagcttcaggagaatttgaacaataacaagaatagggtaagctgggatagaaaggccacctcttcactctctatagaatatagtaacctttatgaaacggggccatatagtttggttatgacatcaatattttacctaggtgaaattgtttaggcttatgtaccttcgttcaaatatcctcatgtaattgccatctgtcactcactatattcacaaaaataaaactctacaactcattctaacattgcttacttaaaagctacatagccctatcgaaatgcgaggattaatgctttaatgcttttagagacagggtctcactgtgttgcccaggctggtctcaaactccaccaaatgtacttcttattcattttatggaaaagactaggctttgcttagtatcatgtccatgtttccttcacctcagtggagcttctgagttttatactgctcaagatcgtcataaataaaattttttctcattgtcaaaaaaaaaaaaaaa

SEQ ID NO: 224 - DNA, 5327 bp, Homo sapiens
  ref <308>: DATABASE ACCESSION NUMBER: NM_016442
actttcggtcctgggggagctaggccggcggcagtggtggtggcggcggcgcaagggtgagggcggccccagaaccccaggtaggtagagcaagaagatggtgtttctgcccctcaaatggtcccttgcaatcatgtcatttctactttcctcactgttggctctcttaactgtgtccactccttcatggtgtcagagcactgaagcatctccaaaacgtagtgatgggacaccatttccttggaataaaatacgacttcctgagtacgtcatcccagttcattatgatctcttgatccatgcaaaccttaccacgctgaccttctggggaaccacgaaagtagaaatcacagccagtcagcccaccagcaccatcatcctgcatagtcaccacctgcagatatctagggccaccctcaggaagggagctggagagaggctatcggaagaacccctgcaggtcctggaacacccccctcaggagcaaattgcactgctggctcccgagcccctccttgtcgggctcccgtacacagttgtcattcactatgctggcaatctttcggagactttccacggattttacaaaagcacctacagaaccaaggaaggggaactgaggatactagcatcaacacaatttgaacccactgcagctagaatggcctttccctgctttgatgaacctgccttcaaagcaagtttctcaatcaaaattagaagagagccaaggcacctagccatctccaatatgccattggtgaaatctgtgactgttgctgaaggactcatagaagaccattttgatgtcactgtgaagatgagcacctatctggtggccttcatcatttcagattttgagtctgtcagcaagataaccaagagtggagtcaaggtttctgtttatgctgtgccagacaagataaatcaagcagattatgcactggatgctgcggtgactcttctagaattttatgaggattatttcagcataccgtatcccctacccaaacaagatcttgctgctattcccgactttcagtctggtgctatggaaaactggggactgacaacatatagagaatctgctctgttgtttgatgcagaaaagtcttctgcatcaagtaagcttggcatcacagtgactgtggcccatgaactggcccaccagtggtttgggaacctggtcactatggaatggtggaatgatctttggctaaatgaaggatttgccaaatttatggagtttgtgtctgtcagtgtgacccatcctgaactgaaagttggagattatttctttggcaaatgttttgacgcaatggaggtagatgctttaaattcctcacaccctgtgtctacacctgtggaaaatcctgctcagatccgggagatgtttgatgatgtttcttatgataagggagcttgtattctgaatatgctaagggagtatcttagcgctgacgcatttaaaagtggtattgtacagtatctccagaagcatagctataaaaatacaaaaaacgaggacctgtgggatagtatggcaagtatttgccctacagatggtgtaaaagggatggatggcttttgctctagaagtcaacattcatcttcatcctcacattggcatcaggaaggggtggatgtgaaaaccatgatgaacacttggacactgcagaggggttttcccctaataaccatcacagtgagggggaggaatgtacacatgaagcaagagcactacatgaagggctctgacggcgccccggacactgggtacctgtggcatgttccattgacattcatcaccagcaaatccaacatggtccatcgatttttgctaaaaacaaaaacagatgtgctcatcctcccagaagaggtggaatggatcaaatttaatgtgggcatgaatggctattacattgtgcattacgaggatgatggatgggactctttgactggccttttaaaaggaacacacacagcagtcagcagtaatgatcgggcaagtctcattaacaatgcatttcagctcgtcagcattgggaagctgtccattgaaaaggccttggatttatccctgtacttgaaacatgaaactgaaattatgcccgtgtttcaaggtttgaatgagctgattcctatgtataagttaatggagaaaagagatatgaatgaagtggaaactcaattcaaggccttcctcatcaggctgctaagggacctcattgataagcagacatggacagacgagggctcagtctcagagcaaatgctgcggagtgaactactactcctcgcctgtgtgcacaactatcagccgtgcgtacagagggcagaaggctatttcagaaagtggaaggaatccaatggaaacttgagcctgcctgtcgacgtgaccttggcagtgtttgctgtgggggcccagagcacagaaggctgggattttctttatagtaaatatcagttttctttgtccagtactgagaaaagccaaattgaatttgccctctgcagaacccaaaataaggaaaagcttcaatggctactagatgaaagctttaagggagataaaataaaaactcaggagtttccacaaattcttacactcattggcaggaacccagtaggatacccactggcctggcaatttctgaggaaaaactggaacaaacttgtacaaaagtttgaacttggctcatcttccatagcccacatggtaatgggtacaacaaatcaattctccacaagaacacggcttgaagaggtaaaaggattcttcagctctttgaaagaaaatggttctcagctccgttgtgtccaacagacaattgaaaccattgaagaaaacatcggttggatggataagaattttgataaaatcagagtgtggctgcaaagtgaaaagcttgaacatgatcctgaagctgacgcaacaggatgaaaatccatcagaatctcagactacagcactaaatatgctttgatgctacatcaaacggaatggaagcatagctgacttcgctaaagttacttcatctccatctagcaaatgaggcactgttctcaaccaaaggagatggggatctggtttagggcaatccctttataatttgatgtgctgtggtctccttggtaatgtataatttggtattgcacaggtgattagtcaaggaagtctggaaaagctttggtcccacagccttgcctcacagcatgtaaataattaaaacaatattgatgctgaggttcttctactgctagtatgaaagtgacaaatttttactggtgtgaattgggaagaaaacaatgctattccatgacgtttgtaaaatgtttgtaaaagctcaaacatgacgattccataaaataaacttgaggttaaataatgggtagtaaattatagaatgtataagaaaaaatataaaggagaaaatcaattatcaggaaagctaaagaacttttcaaatctagtaatttgaatatagacacaatgcactttattgcactttcaattcttataaagcaacaataatattaaggtccttgactatgtgtacaatgttttcacatatatagtttcatttaatcatttcaaagttaatctctgccatctcgctaaatcatcagtctcggctcttctgaaatagaaggtgcctgatcttcctaataattctgcctattttcatttgctttaaacaggcgccctattttctttctagttgtggctgcgcaaaaacatttatctcccaaataagatgtgctgcttaccgaggtatcacggggtggggctccagcttgggtcgttgaagctggggtttgggaaaccacttcagagatggcagcagcaagtttagcatcttcaaatttcttttattgaaaaaaattttattagtaacatgttgtatataaaattatgagcacaatgccatcacttaactataactcttaaagatagcttaatgactgtttattctcttgaccaaatagactcataataacatataattttaaaagaaatttaaattctttcttctctattgtattattttatacaatttgctatttctatttccttctcatattgattattctaaatactatgcaataatataacttagagttccacggtttgtttacacatttcctgttgtacatttaggttattcaaagttttcagctcttttaaaattgctctgaataagttctagtgagtgagttatggtgctggctatattttgctaaactgccctctcaaatgttgctaggaattcatactgcgaaaagcaatgaataagcatgcctgttttcccatggccttgcttgccagaatttgacttttattatgataatcagtgtaaaatgatatactactattgcttgtatattgtggtatacggtgtcaggtttcagggttttttttcaacgttaaatattctagaaactttctgaaataatttctgtttaaaaatattgaatatttgcttcatttcaaatactcccttttgacaaaaaaacttaggtataactgttgatgaaaaaccagaaaaaagtccagaactctttggtgactccaactatggatagcttattttgaaaaaggagaattgcaaattttaccaaaagatggagaaaagcacattaaaaagataccaacattcagaaattcatttcagcatgttattattggaaattatttaaactaatttagataactataagatacttattgtccatttataccctgtaaagccgttttagaatgtaatattttaggtaatccaaaatgtactaaattaaattcatttttagttatgagaaatctttgcttatatgacaaatgaaaagaataacaagttgtcaaatgaaaagaatgacattgaaacatttgtattgtctcttcttaaactatcttattgacttattatttaagccttttaatactaagtatgaaacaacctatggtctggaaatttgtatcgcaaagctatatgtgcatatgttatttaattcatctaacgctacacaaaagcataaaataatgatttttcactctctttaaaaatactaaatcatttatgtccatttctcaattttttcattgatctatgctttgagtttgctttctcaacattattgtattttccacttattattactgtataacatatgctagtgtttagttggattaatcttacctaaaagtactgaaaaatgctttttagtactttttcatattttatacatttattttccgaatgtatcattgaataattttattgagttataaaagtatcttattgctatttaataaaaaattaacacat

SEQ ID NO: 225 - DNA, 1244 bp, Homo sapiens
  ref <308>: DATABASE ACCESSION NUMBER: NM_016602
agagatggggacggaggccacagagcaggtttcctggggccattactctggggatgaagaggacgcatactcggctgagccactgccggagctttgctacaaggccgatgtccaggccttcagccgggccttccaacccagtgtctccctgaccgtggctgcgctgggtctggccggcaatggcctggtcctggccacccacctggcagcccgacgcgcagcgcgctcgcccacctctgcccacctgctccagctggccctggccgacctcttgctggccctgactctgcccttcgcggcagcaggggctcttcagggctggagtctgggaagtgccacctgccgcaccatctctggcctctactcggcctccttccacgccggcttcctcttcctggcctgtatcagcgccgaccgctacgtggccatcgcgcgagcgctcccagccgggccgcggccctccactcccggccgcgcacacttggtctccgtcatcgtgtggctgctgtcactgctcctggcgctgcctgcgctgctcttcagccaggatgggcagcgggaaggccaacgacgctgtcgcctcatcttccccgagggcctcacgcagacggtgaagggggcgagcgccgtggcgcaggtggccctgggcttcgcgctgccgctgggcgtcatggtagcctgctacgcgcttctgggccgcacgctgctggccgccagggggcccgagcgccggcgtgcgctgcgcgtcgtggtggctctggtggcggccttcgtggtgctgcagctgccctacagcctcgccctgctgctggatactgccgatctactggctgcgcgcgagcggagctgccctgccagcaaacgcaaggatgtcgcactgctggtgaccagcggcttggccctcgcccgctgtggcctcaatcccgttctctacgccttcctgggcctgcgcttccgccaggacctgcggaggctgctacggggtgggagctcgccctcagggcctcaaccccgccgcggctgcccccgccggccccgcctttcttcctgctcagctcccacggagacccacagtctctcctgggacaactagggctgcgaatctagaggagggggcaggctgagggtcgtgggaaaggggagtaggtgggggaacactgagaaagaggcagggacctaaagggactacctctgtgccttgccacattaaattgataacatggaaatgaaaaaaaaaaaaaaaa

SEQ ID NO: 226 - DNA, 1019 bp, Homo sapiens
  ref <308>: DATABASE ACCESSION NUMBER: NM_016815
gagcccctcccctcggcccgcgcgggaggagtgtgacccaggtgccgcttcctctcgccgccgagggtcaggagcccgggagcgcgaccctcccccggcccggcctggcccggcctggccagtccccgcggtctctgcccgggctgacgcccaggaatgtggtcgacgagaagccccaacagcacggcgtggcctctcagcctcgagcctgatccagggatgtctggatggccggatggcagaatggagacctccacccccaccataatggacattgtcgtcattgcaggtgtgattgctgctgtggccatcgtcctagtctccctcctcttcgtcatgctgcgctacatgtaccggcacaagggcacgtaccacaccaatgaggccaagggcacggagtttgctgagagtgcagatgcagccctgcagggagaccctgccctccaagatgctggtgatagcagcagaaaggagtactttatttgagggacaacagacttcacttccctgaatgcctcccccatctccatcaggaaaaatacaccccatcgcccagcacccctgctgataccaccagacagagagagagagcacttgattcttcccgagatagccacctggaaacactaggtgcctgcccagggaggaacggaggaggactcgcgctacaagaggccactcccagggacccagggaggcgatggccaccccagaggccaccttttgctccacggaggtgggagaaaatctgggcacatggggccccctgggcagtgcaggacaacatcagctcactggcaggaaagtccttgttgagggtgagggggtgctggggtacccgggggctggggaagcaaggaaataagtcatctgtatgctgactggggataatggcatcaaatgtcagtccttgacatttggggggaacagcaggtgccagagctaaaaggtacctttgtctgccattgatccagctcagaacgattggaaataaatttgaaatgtaaccgagcaaaaaa

SEQ ID NO: 227 - DNA, 2189 bp, Homo sapiens
  ref <308>: DATABASE ACCESSION NUMBER: NM_017613
aggggcgggcccggcgcgcgcgggaagtctctgtagggcggccggctaccctcagccgccgcgcgtcatggccctttcggtgcccggctactcaccgggcttccgaaagccgcccgaggtagtgcggctccgacggaaaagggcccggagccgtggagctgccgcctccccgccccgtgagctgacggagccggcggcccgccgagccgccctggtggcggggctgcctcttcgccctttccctgctgcggggggcagaggcggtggcagcggcggcggcccggccgctgctcggaggaaccccttcgcccgcctggacaaccgaccgcgggtcgccgcggagccccccgacgggccggcccgcgagcagccggaggccccggtcccgtttttagattctaatcaagaaaatgatttgctatgggaagagaagtttcctgaaagaacaactgttactgaattacctcagacttcacatgtatcattctccgagcctgatattccgtcctcaaaaagtactgagttacctgtggactggagtattaaaacgcgactccttttcacctcttctcaaccctttacctgggcagatcatttgaaagcacaggaagaagctcaaggtcttgtccagcattgtagggcaacagaagttactttgcctaaaagtatacaggatcccaaactctcctctgagctccgttgtaccttccagcagagccttatctattggctccaccctgctttgtcttggctaccactgttccctcgtattggagctgatagaaaaatggctggaaagacaagtccttggtcaaatgatgcaaccctgcagcatgttttaatgagtgactggtctgtgagctttacttctctatataatttgctgaagacaaaactttgcccctatttctacgtttgtacctatcagtttactgtcctgttccgagcagcaggattagctggaagtgacttaatcacagctctcatatctccaacaactcgaggtttaagagaagctatgagaaatgaaggtattgaattttctctgcctttaataaaagaaagtggccataagaaggagacagcatctggaacaagcttgggatatggggaggagcaagccatcagtgatgaggatgaagaggaaagtttttcctggctggaagagatgggtgtgcaagataaaattaaaaagccagacatactttctatcaagctgcgtaaagagaaacatgaagtacaaatggatcacagacctgaatctgttgtgttggtaaaaggaatcaacacctttacattgctcaattttttgattaactctaagagtttagttgctacctcaggtccacaggcaggacttcctccaaccctcttgtcccctgttgctttccgaggtgccacaatgcaaatgcttaaggcacggagtgtgaatgtgaagacacaagctctttctggatacagagaccaatttagtttggagattacaggtcctatcatgcctcattctctgcattcactgaccatgctgctcaaatcttcacagagtggatctttctctgcagtactgtatccacacgagccaactgctgtatttaacatctgcctgcaaatggacaaagtacttgatatggaggttgttcataaggagcttactaactgtggtttgcaccctaacactctggagcaacttagtcaaataccgttacttgggaaatcatctttacggaatgtggtgctgagagactacatttataattggagatcctgaacaccaaagtaagcctaaaaggaatctttgaggaaaaaagccttctagcaaggaaattcaagattcttgaagttgaaggaatatactgaaatgtttataaacataacttttactacagtagcatctaaggttttaaatgtgttttactattttcagattagatttttagatataaagatgaaaaactcagataactcaaatgagatatctatatccctacaacctaattgtatattgagcagaaactgaattaatatgcttccttgcaaatgggaaatcacatagcagttaccccatggcattgtgactaatggcatcagggcaaaaatatgttactttacgatttacctgttagcaggttcttgtttcataaaggtagaaaataaatacagacaacatctaaaaaaaaaaaaaaaaaaaa

SEQ ID NO: 228 - DNA, 2999 bp, Homo sapiens
  ref <308>: DATABASE ACCESSION NUMBER: NM_017647
atacttgtgcggttccaagtgtggagaaagcggctctgggtctagattgagggatactccccctttccaccatgggcaagaagggcaaagttggcaagagccgacgagacaagttttatcacttggcgaaggagacgggttaccgttcccgatctgctttcaagctgatccagctcaatcgccgctttcagttcctgcagaaagcccgagccttgctggacctgtgtgctgcgccagggggatggctgcaggtagctgccaagtttatgcctgtatccagccttattgtgggagtggacctggttccaatcaagcctctccccaatgtggtgactctccaggaggacatcacaacagaacgttgtaggcaggccctgaggaaggagctgaagacctggaaggttgatgttgtgctcaatgatggggcccccaacgttggggctagctgggtccatgatgcttactcacaagcccatttgacactgatggctctacgtttggcttgtgactttttggcccgtggtggcagcttcatcacaaaggttttccgttctcgtgactatcagcctctgctatggatctttcagcagctgttccgccgtgtccaggccaccaagccccaagcctctcgccatgaatctgcagagatctttgtagtctgccaaggattcctggcccctgacaaggttgacagtaaattctttgaccccaaatttgcctttaaggaggttgaagttcaggctaagaccgttactgaattggttactaagaagaagccaaaggctgaaggctatgctgagggtgacctcactctctatcaccgtacctcagtcactgacttcctccgagctgccaaccctgttgacttcctctccaaggccagcgaaatcatggtagatgatgaagagttggcacagcatccagctaccactgaggacatacgggtgtgctgtcaggacatcagagtgttggggcgcaaggagctcaggtcgctactaaactggagaacaaaacttcggcgatatgtggccaagaagctgaaagaacaagcaaaggcactggacatcagcctcagctctggagaggaagatgaaggtgatgaggaggactcaacagctggaaccacaaagcagccctctaaggaggaggaggaagaggaggaggaggaacaactgaaccagaccttggcagaaatgaaggcccaggaggtggcggaattgaagaggaagaaaaagaagctgttgcgtgagcagagaaagcagcgggagcgtgtggagctgaagatggatctgcctggggtttccattgcagacgagggggagactggcatgttctccttgtgcaccatccggggtcaccagttattagaggaagtaacacaaggggatatgagtgcagcagacacatttctgtccgatctgccaagggatgatatctatgtgtcagatgttgaggacgacggtgatgacacatctctggatagtgacctggatccagaggagctggcaggagtcaggggacatcagggtctaagggaccaaaagcgtatgcgacttactgaagtgcaagatgataaagaggaggaggaggaggagaatccactgctggtaccactggaggaaaaggcagtactgcaggaagaacaagccaacctgtggttctcaaagggcagctttgctgggatcgaggacgatgccgatgaggccctggagatcagtcaggcccagctgttatttgagaaccggcggaagggacggcagcagcagcagaagcagcagctgccacagacacccccttcctgtttgaagactgagataatgtctcccctgtaccaagatgaagcccctaagggaacagaggcttcttcggggacagaagctgccactggccttgaaggggaagaaaaggatggcatctcagacagtgatagcagtactagcagtgaggaagaagagagctgggaacccctccgtggtaagaagcgaagccgtgggcctaagtcagatgatgacgggtttgagatagtgcctattgaggacccagcgaaacatcggatactggaccccgaaggccttgctctaggtgctgttattgcctcttccaaaaaggccaagagagacctcatagataactccttcaaccggtacacatttaatgaggatgagggggagcttccggagtggtttgtgcaagaggaaaagcagcaccggatacgacagttgcctgttggtaagaaggaggtggagcattaccggaaacgctggcgggaaatcaatgcacgtcccatcaagaaggtggctgaggctaaggctagaaagaaaaggaggatgctgaagaggctggagcagaccaggaagaaggcagaagccgtggtgaacacagtggacatctcagaacgagagaaagtggcacagctgcgaagtctctacaagaaggctgggcttggcaaggagaaacgccatgtcacctacgttgtagccaaaaaaggtgtgggccgcaaagtgcgccggccagctggagtcagaggtcatttcaaggtggtggactcaaggatgaagaaggaccaaagagcacagcaacgtaaggaacaaaagaaaaaacacaaacggaagtaagcagagctgccaggctcccaggagagcatggggactaggaggaagggtgtggcatggctcagtctggcccccttgattaccggcctagcccctgctcacatcacagctgtctgaagaacagtgaggtggagtgcctagaactcccgtggtggtcctgagcagagaggaggatgtcctcctgcctgcctgaaggtctcccatgaaaacactgctgaactgtgttgacactcatgaccctttttttaaaccgttaaagggaagttcggtgttggagcgatactcaatgtagtcagtctacacctggacgtgtgggccacttaagccctccccacccccatcctattcctaaataaaaccaggataatggaaaaaaaaaaaaaaaaa

SEQ ID NO: 229 - DNA, 1685 bp, Homo sapiens
  ref <308>: DATABASE ACCESSION NUMBER: NM_017681
agttcagggccggacagcgagcggcggcgacttgccagtaagggtttggagtcatcagcaggtttaattttggaggaactttacaggtttggctccagcagctgctgttgccaccaccactagttcaagcaccatgcagtttacctcaatatcaaattctttgacctccactgctgctattgggctctcatttacaacttcaacgactaccaccgccactttcaccaccaacactactaccacaatcaccagtggctttactgtgaaccaaaaccaactgttatcaagagggtttgaaaaccttgtaccttatacttcaactgttagtgtagtagcaactcctgtgatgacatatggtcatctggagggtcttataaatgagtggaaccttgagctggaagatcaagagaagtactttcttctccaggccactcaggtcaatgcttgggaccatacattgattgagaatggtgagatgattcgtattttacatggagaagtgaacaaagtgaaactggatcagaaaagattggaacaagaattggattttatcctgtcacagcagcaggaactagaatttctgttgacttatttagaggagtctacgcgcgaccagagtggacttcattatctgcaggatgcagatgaggagcatgtggagacctccaccagatctgcagaattctgaatgcccatatggactccctgcagtggattgatcggaattcaggcatgctgcgaaggaaggtagaagtggtaacacgggttttcgaggattatcgtcacgaggagcatgcacacaatgtcaacactgctttttagtgaatgaccatatcttcagcatgtcgtttctggattattacctacaaattctgatgttaaatagagtagtatttatacttaatatttcatcttgatcataatgaattgtgcatcctttttttcatttaagtattgtactgttgagaattataccttagttttgtttttagtattagaaaatcaaaattatactagcccctttgtccagacagcaacctcttagatgctgactctatatgtgtaatttatgtcttactctccctggcatcagtacacatcatcctcctcactccagttgaatcatagggtgatgtctgccaaaagtacatgccaacctatatagtgctagatactgtaaagtctcttcttctcaaaggaacctactgtctagtttgagatataattaatgcttgtctgcataaaaacaatatagataatataaagaagtgcagtatgaattatagaaagtgtgttatagagattcagagcagggaggaaaagttagggtagattattattaaagggttaaggaaaggtaagtttcaaggaatttggttatttttaatgtatggatatactggcattttatttggttttagcatatgatttatagttggtgatttccgtatatttgtttgtttttctttttttttgtttgtttgttttgttttgttttaaataagccttgttcttaggtttggaacagtctggtctcctgtgtttcatgtttcacctaagtcataaataaaggtaatgtcctaaaaaaaaaaaaaaaaaaaaaaaaaaaaaaaaaaaaaaaaaaaaaaaaaaaaaaaaaaaaaaaaaaaaaaaaaaaaaaaaaaaaaaaaaaaaaaaaaaaaaaa

SEQ ID NO: 230 - DNA, 2140 bp, Homo sapiens
  ref <308>: DATABASE ACCESSION NUMBER: NM_017697
gaattcaagaaatgttgccctggttcacctgatattgacaaactggacgttgccacaatgacagagtatttaaattttgagaagagtagttcagtctctcgatatggagcctctcaagttgaagatatggggaatataattttagcaatgatttcagagccttataatcacaggttttcagatccagagagagtgaattacaagtttgaaagtggaacttgcagcaagatggaacttattgatgataacaccgtagtcagggcacgaggtttaccatggcagtcttcagatcaagatattgcaagattcttcaaaggactcaatattgccaagggaggtgcagcactttgtctgaatgctcagggtcgaaggaacggagaagctctggttaggtttgtaagtgaggagcaccgagacctagcactacagaggcacaaacatcacatggggacccggtatattgaggtttacaaagcaacaggtgaagatttccttaaaattgctggtggtacttccaatgaggtagcccagtttctctccaaggaaaatcaagtcattgttcgcatgcgggggctccctttcacggccacagctgaagaagtggtggccttctttggacagcattgccctattactgggggaaaggaaggcatcctctttgtcacctacccagatggtaggccaacaggggacgcttttgtcctctttgcctgtgaggaatatgcacagaatgcgttgaggaagcataaagacttgttgggtaaaagatacattgaactcttcaggagcacagcagctgaagttcagcaggtgctgaatcgattctcctcggcccctctcattccacttccaacccctcccattattccagtactacctcagcaatttgtgccccctacaaatgttagagactgtatacgccttcgaggtcttccctatgcagccacaattgaggacatcctggatttcctgggggagttcgccacagatattcgtactcatggggttcacatggttttgaatcaccagggccgcccatcaggagatgcctttatccagatgaagtctgcggacagagcatttatggctgcacagaagtgtcataaaaaaaaacatgaaggacagatatgttgaagtctttcagtgttcagctgaggagatgaactttgtgttaatggggggcactttaaatcgaaatggcttatccccaccgccatgtaagttaccatgcctgtctcctccctcctacacatttccagctcctgctgcagttattcctacagaagctgccatttaccagccctctgtgattttgaatccacgagcactgcagccctccacagcgtactacccagcaggcactcagctcttcatgaactacacagcgtactatcccagccccccaggttcgcctaatagtcttggctacttccctacagctgctaatcttagcggtgtccctccacagcctggcacggtggtcagaatgcagggcctggcctacaatactggagttaaggaaattcttaacttcttccaaggttaccagtgtttgaaagatgtatggtgatcttgaaacctccagacacaagaaaacttctagcaaattcaggggaagtttgtctacactcaggctgcagtattttcagcaaacttgattggacaaacgggcctgtgccttatcttttggtggagtgaaaaagtttgagctagtgaagccaaatcgtaacttacagcaagcagcatgcagcatacctggctctttgctgattgcaaataggcatttaaaatgtgaatttggaatcagatgtctccattacttccagttaaagtggcatcataggtgtttcctaagttttaagtcttggataaaaactccaccagtgtctaccatctccaccatgaactctgttaaggaagcttcatttttgtatattcccgctcttttctcttcatttccctgtcttctgcataatcatgccttcttgctaagtaattcaagcataagatcttggaataataaaatcacaatcttaggagaaagaataaaattgttattttcccagtctcttggccatgatgatatcttatgattaaaaacaaattaaattttaaaacacctgaaaaaaaaaaaaaaaaa

SEQ ID NO: 231 - DNA, 3486 bp, Homo sapiens
  ref <308>: DATABASE ACCESSION NUMBER: NM_017870
attgtctgggaattgcagccgcggggcgggcggcggcggcggcggcggcggccgggacccagcgggccaggtggggacggcgcggagcgggtgcgggagatgccgtgcgggactggggccacctgagccgcccgcctcgtccccgccttctgtgggaaggatgtgcgcgcggatggccggtcgcacaacagcggcccctcgggggccctacggcccctggctctgcctcctggtggccctcgccctggacgtcgtgagagtggactgtggccaggctcccctggaccctgtctacctgccggcagccctggagctcctagacgcccctgaacacttccgtgtgcagcaggtgggccactacccacctgccaactcctctctgagctcccgatctgagacctttctgctcctacagccctggcccagggcccagccacttctccgggcctcctacccaccttttgccactcagcaggtggtcccccctcgagtcactgagccccaccaacggccagtcccatgggacgtgcgggccgtttcagtggaagcggctgtgactccagcagagccctacgcccgggttctcttccacctcaaagggcaggattggccaccagggtctggcagcctgccctgtgcccggctccatgccacacaccctgcaggcactgctcaccaagcctgccgcttccagccatccctgggcgcctgcgtggtggagctggagcttccctcgcactggttctcacaggcctccaccacacgggccgagctggcctacacgcttgagcctgcagctgagggccctgggggctgtggctccggcgaggagaacgaccctggggagcaggccctcccagtggggggtgtggagctgcgcccagcagaccccccgcagtaccaggaggtacctctggacgaggctgtgactctgcgggtgcctgacatgccagtgcggcccggccagctctttagtgctaccctcctgcttcggcacaacttcacagccagcctcctgaccctgcggatcaaggtgaagaaggggctgcatgtgacagccgcccgcccagcccagcccacactctggactgccaagctagaccgcttcaagggctccaggcaccacaccaccctcatcacctgccaccgtgctgggctcacagagccagattccagcagtccccttgaactgtctgagttcctatgggtggactttgtggtggagaatagcactggtgggggcgtagcggtcactcgccccgtcacgtggcagctggagtacccaggccaggcccctgaagcagagaaggacaaaatggtgtgggaaatcctggtgtctgagcgggacatcagagcccttatcccactggccaaggctgaggagctggtgaatacagcaccactgactggagtgccccagcatgtccccgtgcgccttgtcactgtggacggcgggggggccttggtggaggtgacagagcatgtcggctgcgagtctgccaacacacaggtcctgcaggtgtctgaggcctgtgatgccgtgttcgtggctggcaaggagagccggggcgcccggggggtgcgagtggacttctggtggcgccggctccgcgcctcgctgcggctgaccgtgtgggcccccctgctaccgctgcgtatcgagctcaccgacaccaccctcgagcaggtccgcggctggagggtacctggccctgctgaagggcctgcggaacccgctgcagaggcgtcggatgaggccgagcggcgcgcccgtggctgccacctgcagtaccagcgggccggtgtgcgcttcctcgcccccttcgcggcccacccgctggacggcggccgccgcctcacgcacctgcttggccccgactggctgctagacgtgtcccacctcgtggcgccacacgcccgcgtgctggactcgcgtgtagcctctctggagggtggccgtgtcgtggtgggccgggagcccggtgtcacctccattgaggtgcgttccccactgtctgactccatcctgggggagcaggcgctggctgtgacggacgacaaggtctcagtgctggagctgagggtgcagccagtgatgggcatctcgctgaccttgagccggggcactgcccaccccggggaggtcacagctacgtgctgggcacagtcagcccttcccgccccaaagcaggaggtggccctctccctatggctgtccttctctgatcacactgtggccccagctgagctctacgaccgccgtgacctgggactgtccgtctcagccgaggagcctggtgccatcctgccagctgaggagcagggtgcccagctcggggtggtggtgagtggggcaggcgccgaggggctgccgctgcatgtggctctgcacccgcccgagccctgccgccggggccgccaccgtgtgcctctggcctctggcaccgcctggctggggctgccccctgcctccactccagcccctgctctcccatccagccctgcttggagcccaccagccacagaagccaccatgggtggtaaacggcaggtggcaggcagtgtcgggggcaacacaggtgtgaggggcaagtttgagcgggcagaggaggaggccaggaaggaggagaccgaagccagggaggaggaggaggaagaggaggaggagatggtccctgcccctcagcatgtcactgagctagagctgggcatgtacgccctgctgggagtcttctgcgtggccatcttcatcttcttggtcaatggtgtggtcttcgtcctgcgctatcagcgcaaagaacctcccgacagtgccactgaccccacctccccccagccccacaactgggtctggctgggcactgaccaggaggaactgagccgccagctggaccggcagtcccctggcccgcccaagggggaggggagctgcccctgtgagagtgggggaggaggggaggcccctaccctggcccctggccctcctgggggcaccaccagctcctcaagcaccctggcccgaaaggaggctggggggcggcggaagcgagtagagtttgtgacatttgcgccagcccctccagcccagtcacctgaggagcctgtaggggcccctgctgtgcagtccatccttgtggcaggcgaggaggacatccgctgggtgtgtgaggacatggggctgaaggaccctgaggagcttcgcaactacatggagaggatccggggcagctcctgaccctccacagccacctggtcagccaccagctggggcaacgagggtggaggtcccactgagcctctcgcctgcccccgccactcgtctggtgcttgttgatccaagtcccctgcctggtcccccacaaggactcccatccaggccccctctgccctgccccttgtcatggaccatggtcgtgaggaagggctcatgccccttatttatgggaaccatttcattctaacagaataaaccgagaaggaaaccag

SEQ ID NO: 232 - DNA, 2428 bp, Homo sapiens
  ref <308>: DATABASE ACCESSION NUMBER: NM_017888
gcatttggggctgaagttccctgtgggaggctgttttctgagggagctgagtgtttacagccactcagccctgctctgctcagctgaagcagaaaacagagaccttttgcattactttggttcaagagcaagacaggaggcgactgcatgagaccatggctgagacacctagtcctccaggcactgaggaactccagggcattctgtgggtctcatgggaagccagcacctctacctgttcctcagaagatcgtggccacctgggaagccatcagcctgggaaggcagctggtgcctgagtacttcaacttcgcccatgatgtgctggatgtgtggagtcggctggaagaggctggacaccgccccccaaatcctgccttctggtgggtcaatggcacaggagcagagatcaagtggagctttgaggagctggggaagcagtccaggaaggcagccaatgtgctggggggtgcatgcggcctgcagcctggggacagaatgatgctggtactcccacggctcccggagtggtggctggtcagtgtggcttgcatgcggacagggactgtgatgattccgggtgtgactcagctgacagagaaggacctcaagtaccggctgcaggcgtccagggccaagtccattatcaccagtgactccctagctccaagggtggatgccatcagtgccgaatgcccctccctccagaccaagctgctggtgtcagacagcagtcggccaggctggttgaacttcagggaactcctccgggaggcttctacagagcacaactgcatgaggacaaagagtcgagacccgctggccatctactttaccagcggaaccaccggggcccccaagatggtcgagcactcccagagcagctacggactgggttttgtggccagcggaagacggtgggtggccttgaccgaatctgacatcttctggaacacgactgacactggctgggtgaaggcagcctggactctcttctctgcctggcctaatggatcttgcatttttgtgcatgagctgccccgagttgatgccaaagttatcctgaatactctctccaaattcccgataaccaccctctgctgtgtcccaaccatctttcggctgcttgtgcaggaggatctgaccaggtaccagtttcagagcctgaggcactgtctgaccggaggagaggccctcaaccctgacgtgagggagaagtggaaacaccagactggtgtggagctgtacgaaggctatggccagtctgaaacggttgtcatctgtgccaatccaaaaggcatgaaaatcaagtctggatccatggggaaggcgtccccaccctacgatgtgcagattgtggatgatgagggcaacgtcctgcctcctggagaagaggggaatgttgccgtccgtatcagacccactcggcccttctgtttcttcaattgctatttggacaatcctgagaagacagctgcatcagaacaaggggacttttacatcacaggggaccgagctcgcatggacaaggatggctacttttggttcatgggaagaaacgacgatgtgatcaattcttcaagctaccggatcgggcctgttgaagtggaaagtgccctggcagagcatcctgctgtcctggagtcggctgtggtcagcagcccagaccccatcaggggagaggtggtaaaggcatttatagtccttactccagcctactcctctcatgacccagaggcactaacgcgggaactccaggagcatgtgaaaagggtgactgctccatacaaataccccaggaaggtggcctttgtttcagaactgccaaagacggtttctggaaagatccaaaggagtaaattgcgaagtcaggagtgggggaaatgaggtgcaccccaggaaggccccgtagacctccgaagactccacaagaaactaatggatcactggtcagtccccatggggagcatcatctcttcgaccctaaagatgtcaaaggtgtgcagcttccaaacggcatccccaggatcactgggcaatgctggaaagagcaaaagaatatcattggccctgatcacatagatgctgcgccgcctagcaaatgcttggtggttcgacttctccctctgtctgggggcaggctcagcatctgcccactggtctcactaagagctttcagatttccctccataggacaggttaccatagacttggggcacttgtgggtactcattttctgccagtgggaatgtaaaggcttcatcctttgtatgtaaccatttggcaaaagtatgcaggaacataaaataaaatatcctttagctcagaaattctatcttcgggagtcaccacaaaagaaaaaaatcaaaatgcagaaaatgtgtggtgcactaagatgatcacacagcattaaaactaaaaaaaaaaa

SEQ ID NO: 233 - DNA, 1163 bp, Homo sapiens
  ref <308>: DATABASE ACCESSION NUMBER: NM_017899
agatccagcaggtgcgcgaaaccgcggcgcgccgccctccgccgttatatgaggccccgctccggccccacgcggaacccgcggctccgagccttcgccggcgtcccgacccgaggccggacccgaggccagtcccgccgctgcgcagccgaagccagtgcggggcctgagagggacgcgcgccccggggcccccgccgcgggcaccatgggcgctgcccactccgcgtctgaggaggtgcgggagctcgagggcaagaccggcttctcatcggatcagatcgagcagctccatcggagatttaagcagctgagtggagatcagcctaccattcgcaaggagaacttcaacaatgtcccggacctggagctcaaccccatccgatccaaaattgttcgtgccttcttcgacaacaggaacctgcgcaagggacccagtggcctggctgatgagatcaatttcgaggacttcctgaccatcatgtcctacttccggcccatcgacaccaccatggacgaggaacaggtggagctgtcccggaaggagaagctgagatttctgttccacatgtacgactcggacagcgacggccgcatcactctggaagaatatcgaaatgtaaagtggtcgaggagctgctgtcgggaaaccctcacatctagaaggagtccgctcgctccatcgccgacggggccatgatggaggcggccagcgtgtgcatggggcagatggagcctgatcaggtgtacgaggggatcaccttcgaggacttcctgaagatctggcaggggatcgacattgagaccaagatgcacgtccgcttccttaacatggaaaccatggccctctgccactgacccaccgccacctccgcggagagactgcactttgcaatggggccgcctccccgcgtagctggagcagcccaggcccggcggacagcctcttcctgcagcgccggtacatagccaaggctcgtctgcgcaccttgtgtcttgtagggtatggtatgtgggacttcgctgtttttatctccaataaaaaaaaaaaaaaaaggtttgttaattaaaaaaaaaaaaaaaaagaaaaaaaaaaaaaaaaaaaaaaaaaaaaaagaaaaaaaaaaaaaaaaaaaaaaaaaaaaaaaaaaaaaaaaaaaaaaa

SEQ ID NO: 234 - DNA, 2832 bp, Homo sapiens
  ref <308>: DATABASE ACCESSION NUMBER: NM_017975
agtcgaggtatcttctccccaaccactgctcttattttaattattgcagacggaagttgaagactattgacatagtaaatagctctgggtggcttgaaacgaaagtttaactttgcggacaaacaggacttattgtagggggtggtcaaaatagtcccggcggggcggggccatgacccctgacgtcgccggtccggcgcgcagttcagtttggcggttccggtaccgctctcacattggggcgggatgtgggagcggctgaactgcgcagcagaggacttttattctcgtctccttcagaaatttaatgaagaaaagaaaggaatccgtaaagacccatttctctatgaggctgatgtccaagtgcagttgatcagcaaaggccaaccaaaccctttgaaaaatattctaaatgaaaatgacatagtattcatagtggaaaaagtgcctttagaaaaggaagaaacaagtcatattgaagaacttcaatctgaagaaactgccatatctgatttctctactggcgaaaatgttggaccacttgctttaccagttgggaaggcaaggcagttaattggactttacaccatggctcacaatcctaatatgacccatttgaagattaatctgccagttactgcccttcctcccctttgggtaagatgtgacagttcagatcctgaaggtacttgttggctaggagctgagcttatcacaacaaacaacagcattacaggaattgtcttatatgtggtcagttgtaaagctgataaaaattattctgtaaatcttgaaaacctaaaaaatttacacaagaaaagacatcacttgtctactgtaacatccaaaggctttgcccagtatgagctctttaagtcctctgccttggatgatacaatcacagcatcacaaactgcgatcgctttggatatttcctggagtcctgtggatgagattcttcaaatccctccactctcttcaactgcaactctgaatattaaagtggaatcaggagagcccagaggtcctttgaatcatctctacagagaactgaaatttcttcttgttttggctgatggtttgaggactggtgtcactgaatggctcgagcccctggaagcaaaatctgctgttgaacttgttcaggaatttctgaatgacttaaataagctggatggatttggtgattctacaaaaaaagacactgaggttgagaccttgaagcatgacactgctgcagtcgatcgttccgtcaagcgtcttttcaaagttcggagtgatcttgattttgctgagcaactgtggtgcaaaatgagcagtagtgtgatttcataccaagacttggtgaagtgtttcacattgatcatccagagtctacaacgtggtgatatacagccatggctccatagtggaagtaacagtttactaagtaagctcattcatcagtcttatcatggaaccatggacacagtttctctcagtgggactattccagttcaaatgcttttggaaattggtttggacaaactaaagaaagattatatcagttttttcataggtcaggaacttgcatctttgaatcatttggaatacttcattgctccatcagtagatatacaagaacaggtttatcgtgtccaaaaactccaccatattctagaaatattagtcagttgcatgcctttcattaaatctcaacatgaactcctcttttctttaacacagatctgcataaagtattacaaacaaaatcctcttgatgagcaacacatttttcagctgccagtcagaccaactgctgtaaagaacttatatcaaagtgagaagccacagaaatggagagtggaaatatatagaggtcaaaagaagattaagacagtttggcaactgagtgacagctcacccatagaccatctgaattttcacaaacctgatttttcggaattaacactaaacggtagcctggaagaaaggatattctttactaacatggttacctgcagccaggtgcatttcaagtgaagtgtgctgatgaagtcctctataagcacaagccaaaaagagaaagagaaaaaaaggtaattattgtagaacctgaaaacagcaatgtatggaaaccctcaaagcagaaaagggaggaagatcctgaagattctcttatgaagctccaaaattgataatcctgtctcagctctgcctcctcaggaggagcattagtagaacagcagtgatgaggacacagagggagcagacagtgggtaccacgatctccgtaaccatttgcatgtgacttagcaagggctctgaaatgacaaagagaacgagcaccacaaatgagaacaggatcattttagtaaatacagctttatcccaaaagctttagctgtattgggaaaacttaaaaaatagcatcctcaaattttctgattcttatttgccatgaaatagaacttagtaaattaaatgttatttgaaaatgttataagagctttgtaaatatttcagaaaatatgggataaatgcctgaatttggttcttctacaggtgctataataaagtccatctctcaatacttatactttctaaattcatctcagaatattagcagccatattccacagttcctataatttttactgggggggatttgtgataggaaagtccttgggaaacatttccaatctttcaaaatattattgtgtatcttaagaagtataggaacttgtatgttgaaatgttgtatggtagttcttgtatagttaaataataatctttttaagagttaatgataagcatatgttatgtgcattattaataaaatagtggccactt

SEQ ID NO: 235 - DNA, 3958 bp, Homo sapiens
  ref <308>: DATABASE ACCESSION NUMBER: NM_018014
ttttttttttttttttgcttaaaaaaaagccatgacggctctcccacaattcatcttccctgcgccatctttgtattatttctaatttattttggatgtcaaaaggcactgatgaagatattttctctggagtctccttctttctaacccggctctcccgatgtgaaccgagccgtcgtccgcccgccgccgccgccgccgccgccgccgcccgccccgcagcccaccatgtctcgccgcaagcaaggcaaaccccagcacttaagcaaacgggaattctcgcccgagcctcttgaagccattcttacagatgatgaaccagaccacggcccgttgggagctccagaaggggatcatgacctcctcacctgtgggcagtgccagatgaacttcccattgggggacattcttatttttatcgagcacaaacggaaacaatgcaatggcagcctctgcttagaaaaagctgtggataagccaccttccccttcaccaatcgagatgaaaaaagcatccaatcccgtggaggttggcatccaggtcacgccagaggatgacgattgtttatcaacgtcatctagaggaatttgccccaaacaggaacacatagcagataaacttctgcactggaggggcctctcctcccctcgttctgcacatggagctctaatccccacgcctgggatgagtgcagaatatgccccgcagggtatttgtaaagatgagcccagcagctacacatgtacaacttgcaaacagccattcaccagtgcatggtttctcttgcaacacgcacagaacactcatggattaagaatctacttagaaagcgaacacggaagtcccctgaccccgcgggttggtatcccttcaggactaggtgcagaatgtccttcccagccacctctccatgggattcatattgcagacaataacccctttaacctgctaagaataccaggatcagtatcgagagaggcttccggcctggcagaagggcgctttccacccactccccccctgtttagtccaccaccgagacatcacttggacccccaccgcatagagcgcctgggggcggaagagatggccctggccacccatcacccgagtgcctttgacagggtgctgcggttgaatccaatggctatggagcctcccgccatggatttctctaggagacttagagagctggcagggaacacgtctagcccaccgctgtccccaggccggcccagccctatgcaaaggttactgcaaccattccagccaggtagcaagccgcccttcctggcgacgccccccctccctcctctgcaatccgcccctcctccctcccagcccccggtcaagtccaagtcatgcgagttctgcggcaagacgttcaaatttcagagcaacctggtggtgcaccggcgcagccacacgggcgagaagccctacaagtgcaacctgtgcgaccacgcgtgcacccaggccagcaagctgaagcgccacatgaagacgcacatgcacaaatcgtcccccatgacggtcaagtccgacgacggtctctccaccgccagctccccggaacccggcaccagcgacttggtgggcagcgccagcagcgcgctcaagtccgtggtggccaagttcaagagcgagaacgaccccaacctgatcccggagaacggggacgaggaggaagaggaggacgacgaggaagaggaagaagaggaggaagaggaggaggaggagctgacggagagcgagagggtggactacggcttcgggctgagcctggaggcggcgcgccaccacgagaacagctcgcggggcgcggtcgtgggcgtgggcgacgagagccgcgccctgcccgacgtcatgcagggcatggtgctcagctccatgcagcacttcagcgaggccttccaccaggtcctgggcgagaagcataagcgcggccacctggccgaggccgagggccacagggacacttgcgacgaagactcggtggccggcgagtcggaccgcatagacgatggcactgttaatggccgcggctgctccccgggcgagtcggcctcggggggcctgtccaaaaagctgctgctgggcagccccagctcgctgagccccttctctaagcgcatcaagctcgagaaggagttcgacctgcccccggccgcgatgcccaacacggagaacgtgtactcgcagtggctcgccggctacgcggcctccaggcagctcaaagatcccttccttagcttcggagactccagacaatcgccttttgcctcctcgtcggagcactcctcggagaacgggagcttgcgcttctccacaccgcccggggagctggacggagggatctcggggcgcagcggcacgggaagtggagggagcacgccccatattagtggtccgggcccgggcaggcccagctcaaaagagggcagacgcagcgacacttgttcttcacacacccccattcggcgtagtacccagagagctcaagatgtgtggcagttttcggatggaagctcgagagcccttaagttctgagaaaatttgaagcccccaggggtggggtggacgcgtgccgcccagtcgacgtcagcgtggtctgtcatcctgctagtttgtgatgttttctgacagtagcctccaagaagccgttgtgcgaagacagagtcctgcagagtccttccagcctaggcctgcagcgccattttatttatattttttaataaaaagtaaaaacaaaaaaacagacccacattggaacagtgaatcagtcccatagagagggcccgtggaccatcgctgtcatgagtgatgccctggcccttctgaaaccagccaacctaattacctgtattgtggaaatgcgcatgagtccccaaccccttgtttctatacattctatgttgtcttttaaaaagtgtgcttaacattgacacaataaatgttggagctttaggtggtgtttgcttgttctttaatttttaatgcttataagacaatgaggctgcttatgattttgtacttctgtacctgtttcctacagacacccatcgggtgggtaggaggaacagatttgagaaatgggcaggagatgtaggaggggaactaggttaccgcttatcagatggcataaattttcaaggagaatcaaaatgcaaaacttgggaataaatcatagcaatatcataattaatgtagtagtaatattgctgtttattaatgctgaagtgtggttttcctaactgtctgacttataatttgcataccattaaataatgcataatatggcacgccgaatcctgtttttcaaatatatgcttttggtggctaccatgcaggatttgaatttgtcttttaatttagcttaggaaagaacatcactgggcgagcggtaaatcctaaagaaggtgataaatgtcagtagtttcttattaaatattctaattttaggttcccaaaccttcaggaaatatatcttaatgcagacaaacaaacataaaacttctttagtacttacatcaggaaatttggggcagattttagaggggggaaattataggaggaaagaagttcacatcagaacagacaatcacagcaatgctctattccttagaaattagtgccacaaataagttacatctacaaacaggtggtaaaaattctttctggcccagttaatttgcacagaacttttctcagtttggtattttttactgcttggagatccagaagagaattagaaacaacatagcaaattaaaataggtttgtcaataatagagctcagacacctgtgtgctgtagattcacatacaggccgtgaacctaagtggggaaaatcctacctatccaccttctggctagattacctagcttagtgaaaagatagccaaataattggcatgtgaattatttcctgcttattcataataaataatgactgtcta

SEQ ID NO: 236 - DNA, 2307 bp, Homo sapiens
  ref <308>: DATABASE ACCESSION NUMBER: NM_018101
gtgactgtggagtttgaattgggtggcggttgactgtagagccgctctctctcactggcacagcgaggttttgctcagcccttgtctcgggaccgcagcctccgccgagcgccatggctcctaggaagggcagtagtcgggtggccaagaccaactccttacggaggcggaagctcgcctcctttctgaaagacttcgaccgtgaagtggaaatacgaatcaagcaaattgagtcagacaggcagaacctcctcaaggaggtggataacctctacaacatcgagatcctgcggctccccaaggctctgcgcgagatgaactggcttgactacttcgcccttggaggaaacaaacaggccctggaagaggcggcaacagctgacctggatatcaccgaaataaacaaactaacagcagaagctattcagacacccctgaaatctgccaaaacacgaaaggtaatacaggtagatgaaatgatagtggaagaggaagaagaagaagaaaatgaacgtaagaatcttcaaactgcaagagtcaaaaggtgtcctccatccaagaagagaactcagtccatacaaggaaaaggaaaagggaaaaggtcaagccgtgctaacactgttaccccagccgtgggccgattggaggtgtccatggtcaaaccaactccaggcctgacacccaggtttgactcaagggtcttcaagacccctggcctgcgtactccagcagcaggagagcggatttacaacatctcagggaatggcagccctcttgctgacagcaaagagatcttcctcactgtgccagtgggcggcggagagagcctgcgattattggccagtgacttgcagaggcacagtattgcccagctggatccagaggccttgggaaacattaagaagctctccaaccgtctcgcccaaatctgcagcagcatacggacccacaaatgagacaccaaagttgacaggatggacttttaatgggcacttctgggaccctgaagagacttcttcccttcaggcttattgtttgagtgtgaagttccagagcaaggagccatgttcctctaagggaattcaggaattcagacgtgctagtcccacaccagttaggtagagctgtctgttcaccctcccatcccagctgatcccagtcactgcttgctggggccatgccatggaagcttcccatcagtctcccagctgaatcctccctgctctctgagctgctgccttttgcctcctgcaactcaacatcctcttcaccctgccctgcctgcagttgagggggcgaagaagaaccctgtgttctcaggaagactgcctccaccaccgctacccagagaacctctgcatctggcatttctgctctctatgcttgagaccgggaggtttaggctcagataagtgagctctgggccatgagagggtaggtccagaaggtggggggaactgtacagatcagcagagcaggacagttggcagcagtgacctcagtagggaacatgtccgtctaccctctcgcactcatgacacctccccctaccagccctcctcttcctcctcctcctcctcctgtgggaggtggtcagtgggacttagggatctttcacctgctgtgcccagtagttctgaagtctgcttgtggagcagtgttttatgtttatccctgtttactgaagaccaaatactggtttggagacaacttccatgtcttgctcttctacctccctagttagtggaaatttggataagggaactgtagggcccagattctggaggttttatgtcattggccacagaataactgtctctaagctatccatggtccagtggtccctgccaagtctgtagacttcagagagcacttctctcttatggggttcatgggaacaggggcgggtgtgacttgcttggtggcctcattccatgtgtgcctgtgcctggggcatggactttgttaagcagagtcagcagtgaggtcctcattctccagccagcctctctgccctggagaatcatgtgctatgttctaagaatttgagaactagagtcctcatccccaggcttgaaggcacatggctttctcatgtagggctctctgtggtatttgttattattttgcaacaagaccattttagtaaaacagtcctgttcaagttgtattcttttaagttcttttattctcctttccctgagatttttgtatatattgttctgagtaatggtatctttgagctgattgttctaatcagagctggtacctactttcaataaattctggttttgtgttttcttctgt

SEQ ID NO: 237 - DNA, 1753 bp, Homo sapiens
  ref <308>: DATABASE ACCESSION NUMBER: NM_018114
ttcctctccggccccacgggcgcgcttccctcctgacggattccgaagcccgccccaccaccgtcaccgcaccagtggcccaggcttcgtgggaccaacagggctaatcctgccccacggatctaatccggatcgggacccggtcccaggggaggcccccacctccccttctattgttctgtggcccaggttccggagcatttgctccatgccctcgcctgcctgcagggccccggtgtggccccggtgctgcgctgcgcgccgacccccgcgggtctgtctctccaactgcagcggtccgccgtcttcgagcgcgtcctcagcgccgtggccgcctatgccacgcccgcctcgcctgcctcgctgggccagcgcgtcttactacactgcccagcactgcgcagctccccctgcgcactccgcttgagccagctgcgtacggtgctcgtggccgatcacctggcgcgagccctgcgcgctcacggggtgtgcgtgcgcctagtgccagctgtgcgggatccgcacatgctgaccttcctgcagcaactgcgggtggactggcccgctgcctcggagagagcttcctcccacaccctgaggagccacgcccttgaagaacttacctctgctaatgacgggaggacactgtcccctggcatcctaggcagactgtgtctgaaggagctggtggaagaacagggccgcacagctggctatgaccccaacctggacaactgtctggtgactgaggatctcctctctgtgctggctgagctgcaagaggctctatggcattggcccgaggacagccacccaggcctggctggggcctcagatactggtacaggcggctgcctggttgtacatgttgttagctgtgaggaggagttccagcaacagaagttggacctgctttggcagaagttggttgacaaggctccactcagacagaagcacctcatctgtggccctgtgaaagtagctggtgcacctggcactctgatgactgcccctgagtactacgagttccggcatacccaggtgtgcaaggcctcagcactgaagcatggtggggatctggcacaagacccagcctggacagagatctttggtgttctctctgtggccaccatcaagtttgagatgctgagcacagccccacagagtcagctcttcctggctctggctgacagcagtatctccacgaagggcacaaagagtggcacctttgtcatgtataattgtgcccgtcttgccacactctttgagagttacaagtgtagtatggaacaaggtctgtaccccacttttcctcctgtgagcagtctggacttctcactgctacatgatgagggtgagtggttgttgctcttcaacagtatcctcccctttccggatctgctgagccggacagcagtgctggactgcacagccccggggctccacattgctgtacgcacagagatgatatgcaagttcctggtacagctcagcatggatttcagctcctactacaaccgggtacacatcctgggggagcctcgaccacacctctttggtcagatgttcgtccgcctgcagcttctgagagctgtgcgtgaggtgctccatactggcctggctatgctgggtctccctccactgagccacatttaaggccacagaggctccaatacctgggaatgttcacaaagtcatcaactggaaaaaaagcaaaaacccacggccaaaataaattggtactgtttgttac

SEQ ID NO: 238 - DNA, 2635 bp, Homo sapiens
  ref <308>: DATABASE ACCESSION NUMBER: NM_018131
ggccgacgcgagcgccgcgcttcgcttcagctgctagctggcccaagggaggcgaccgcggagggtggcgaggggcggccaggacccgcagccccggggccgggccggtccggaccgccagggagggcaggtcagtgggcagatcgcgtccgcgggattcaatctctgcccgctctgataacagtccttttccctggcgctcacttcgtgcctggcacccggctgggcgcctcaagaccgttgtctcttcgatcgcttctttggacttggcgaccatttcagagatgtcttccagaagtaccaaagatttaattaaaagtaagtggggatcgaagcctagtaactccaaatccgaaactacattagaaaaattaaagggagaaattgcacacttaaagacatcagtggatgaaatcacaagtgggaaaggaaagctgactgataaagagagacacagacttttggagaaaattcgagtccttgaggctgagaaggagaagaatgcttatcaactcacagagaaggacaaagaaatacagcgactgagagaccaactgaaggccagatatagtactaccgcattgcttgaacagctggaagagacaacgagagaaggagaaaggagggagcaggtgttgaaagccttatctgaagagaaagacgtattgaaacaacagttgtctgctgcaacctcacgaattgctgaacttgaaagcaaaaccaatacactccgtttatcacagactgtggctccaaactgcttcaactcatcaataaataatattcatgaaatggaaatacagctgaaagatgctctggagaaaaatcagcagtggctcgtgtatgatcagcagcgggaagtctatgtaaaaggacttttagcaaagatctttgagttggaaaagaaaacggaaacagctgctcattcactcccacagcagacaaaaaagcctgaatcagaaggttatcttcaagaagagaagcagaaatgttacaacgatctcttggcaagtgcaaaaaaagatcttgaggttgaacgacaaaccataactcagctgagttttgaactgagtgaatttcgaagaaaatatgaagaaacccaaaaagaagttcacaatttaaatcagctgttgtattcacaaagaagggcagatgtgcaacatctggaagatgataggcataaaacagagaagatacaaaaactcagggaagagaatgatattgctaggggaaaacttgaagaagagaagaagagatccgaagagctcttatctcaggtccagtttctttacacatctctgctaaagcagcaagaagaacaaacaagggtagctctgttggaacaacagatgcaggcatgtactttagactttgaaaatgaaaaactcgaccgtcaacatgtgcagcatcaattgcttgtaattcttaaggagctccgaaaagcaagaaatcaaataacacagttggaatccttgaaacagcttcatgagtttgccatcacagagccattagtcactttccaaggagagactgaaaacagagaaaaagttgccgcctcaccaaaaagtcccactgctgcactcaatgaaagcctggtggaatgtcccaagtgcaatatacagtatccagccactgagcatcgcgatctgcttgtccatgtggaatactgttcaaagtagcaaaataagtatttgttttgatattaaaagattcaatactgtattttctgttagcttgtgggcattttgaattatatatttcacattttgcataaaactgcctatctacctttgacactccagcatgctagtgaatcatgtatcttttaggctgctgtgcatttctcttggcagtgatacctccctgacatggttcatcatcaggctgcaatgacagaatgtggtgagcagcgtctactgagactactaacattttgcactgtcaaaatacttggtgaggaaaagatagctcaggttattgctaatgggttaatgcaccagcaagcaaaatattttatgttttgggggtttgaaaaatcaaagataattaaccaaggatcttaactgtgttcgcattttttatccaagcacttagaaaacctacaatcctaattttgatgtccattgttaagaggtggtgatagatactattttttttttcatattgtatagcggttattagaaaagttggggattttcttgatctttattgctgcttaccattgaaacttaacccagctgtgttccccaactctgttctgcgcacgaaacagtatctgtttgaggcataatcttaagtggccacacacaatgttttctcttatgttatctggcagtaactgtaacttgaattacattagcacattctgcttagctaaaattgttaaaataaactttaataaacccatgtagccctctcatttgattgacagtattttagttatttttggcattcttaaagctgggcaatgtaatgatcagatctttgtttgtctgaacaggtatttttatacatgctttttgtaaaccaaaaacttttaaatttcttcaggttttctaacatgcttaccactgggctactgtaaatgagaaaagaataaaattatttaatgttttaaaaaaaaaaaaaaaaaaaa

SEQ ID NO: 239 - DNA, 1700 bp, Homo sapiens
  ref <308>: DATABASE ACCESSION NUMBER: NM_018154
agatttgaaggcggcgcgcggactaggtgcgcacttcagttctcggagagaagaggcgggagtggacctggtcagccctaccccactgaccccaccggacccaggcgcggcctccgccacagccacagcccctgcccctgctgcggcgcggcgaggcgaggcgatggccaaggtgtcggtgctgaacgtggcggtcctggagaacccgagccctttccacagccccttccggttcgagatcagcttcgagtgcagtgaagccctggcggacgacctggagtggaagatcatttatgttggctcggctgagagtgaggaatttgatcagatcctagactcggtgctggtgggccctgtgccagcagggagacacatgtttgtctttcaggccgacgcccccaacccatccctcatcccagagactgatgccgtgggtgtgactgtggtcctcatcacctgcacctaccatggacaggagttcatccgagtgggctactacgtcaacaacgagtacctcaaccctgagctgcgtgagaacccgcccatgaagccagatttctcccagctccagcggaacatcttggcctcgaacccccgggtgacccgcttccatatcaactgggacaacaacatggacaggctggaggccatagagacccaggacccctccctgggctgcggcctcccactcaactgcactcctatcaagggcttggggctccctggctgcatccctggcctcctccctgagaactccatggactgcatctaactgcaggaacccagagtgtcccagcacgccgggaggggcaaccaggcctcccagcgagtcctgcagggcccatctagaggactttgggggccatcagctgcaatccaggtctgtcaaactcagcccctaggaaagaacaggccttgggtctcccctagtcctggccagaaggatgatctcgcttttcctctacaggcctataagaagcaggtacttcagttctaaattctgacttgtgttcttttcgtcttcataaattctaactaaggccactgtgccactgtgcacccttgagtaccattgatccaaagctttcccacagacctccctggcccacctagaggctttcttggtcagtgcctgtcaaggctccagtcctgctgagccaaaggctttgtcattcctttctcttcctgtacatctgagcagacccactccagctttctggtgtcacaggcgggaatgttagttagtaggtagacttagatcccatttctgtcctgctcccaggaagattcttaggtcctcttcaatccagcagcccctcccagaggtgtgatcagcaggatgctgaggaaccatgttgcctttcctgtcaatcacagccaccttcctgttatctcctaaatggatctggcttttcctggaggctgccatggttggaagatggtatcagagggcctgcctgggcagtctgtctccgggccagggtcagggaccctctgcctctggcagccttaacctgtcctctgctaggaccagggtgatttcaagccagggaagcaactgggaccctgaaaactgtccctccccagcccgctccccctctctgtgccctggtccccttgccgccatgtggatgctgttgtgattgctgtttgtatattatcaaaatgtttttatattaaaaatgtttggtctgaaaatt

SEQ ID NO: 240 - DNA, 1670 bp, Homo sapiens
  ref <308>: DATABASE ACCESSION NUMBER: NM_018286
acatcttttcctttccccagaagagatccctaacctattgttttattgacagccttgctgttagaggctctttcccagaagttggacgaagaggctcaggcgttgctgtttcttgtcttccaagtcaagtggttactctggtaatggattgcctctctccgagctttcaccctggtgagactgtccagatctagtctgtaaacccagcttagaagcactgttgtaaaaatgactgaagagcccatcaaggagatcctgggagccccaaaggctcacatggcagcgacgatggagaagagccccaagagtgaagttgtgatcaccacagtccctctggtcagtgagattcagttgatggctgctacagggggtaccgagctctcctgctaccgctgcatcatcccctttgctgtggttgtcttcatcgccggcatcgtggtcaccgcggtggcttacagcttcaattcccatgggtctattatctccatctttggcctggttgttctgtcatctggactttttttactagcctccagtgccttgtgctggaaagtgagacaaaggagcaagaaagccaagagacgggagagtcaaacagctctcgtggcaaatcagagaagcttgtctgcttgagactgaatacgaccaaatgggccattgggcctggaaaacgtgctctgactttgtcacccaattcacccagaaccatggtgggagagaacagacttggcgttggagcagactggaagaatgggggtgggagggtggaggggcttctcctttgtgaggaatgactcatgtcttctttaacgacaaacttaaccctaagggctacttctgagactgaaaaatcagctttctatttacatgaaacactttgggggtcatgggagtgcacagcattagacagtatttggttcaccctgtaaagtagccaagaaaagatgagaaaaatcaagataggcctggcacactagacatttgcctccaaaagaaataacctacagtcttaagatgtatcataaaaatgttctgccaaggatctaaattaccttgggtttcgcatatgtctatgaaattctgtgataatttttttcaatacattgattcactggcgtctgttttcattttatacttttaataactcatcactggtggtactttatcttgaaaagtaatattttttatattttaacattggacagtgttagccagttgtaatgatgtatcagaagtaaagaaaaacccattaaagttatagctaatagatgctgttgggggttaaattaatagtaaaataatccaatatagcacttttgatgatttttatataaaagtcaactgtacatttcattcagaataataaatacttattgctgctaaaacttcttaaatggttgtttctgctatagttatttctattgcagttccaaattgccatcttcccttgtctcatttgcaagttctcaattgtatttctctcaaatggacaggttccttctttactggaggatttttgtttttatcatattggtttttcattacttctgaatagtcttaattacgtttactaaattctaaaggatttctgtgctattataattaggaaatcaacgtctttggtcaggaactttataatgtgctattaaatgtatattacatttttgtgg

SEQ ID NO: 241 - DNA, 1649 bp, Homo sapiens
  ref <308>: DATABASE ACCESSION NUMBER: NM_018335
ttgcataaaatggttaagaaaatgtgccaagattacctcagtagttctggtctgtgttcccaggagaccctggaaataaacaatgataaggttgctgagtcattaggaatcacagaattcctacggaagaaagaaatacacccagacaaccttggacccaagcacctcagccgagacatggatggggagcagctagagggagctagcagcgagaagagggaacgtgaggctgcggaggagggactggcctcagtgaaaaggcccagaagagaagccctgtccaacgataccactgaatctcttgctgccaacagcagaggccgggagaagcccaggcccttgcatgctttggccgctggtttttcccctccagtaaatgtgactgtctctccccgttctgaagaaagccatacaacgacggtttctggtggcaatgggagcgtgttccaggcgggcccgcagcttcaggcactggctaacttagaagccaggagggggtctataggtgctgctctctcatcccgggatgtcagtgggctgcctgtttgtgctcagtcaggagagcctaggaggctgacccaggcacaggtggcagcgtttcctggagagaatgctttggaacactcttcagaccaggacacctgggacagcctgaggagcccgggtttctgcagccctttgtcatctggtggtggagcagagtccctgccgcctggggggcctggacatgcagaggcaggacacctcggcaaggtttgtgacttccacctgaaccaccagcagcccagccccaccagcgtcctgcctacagaggtggcagcccctccgcttgagaaaattttgtctgtggatagcgtggcagtggactgtgcctacaggactgtgcccaagccagggcctcagcctggcccacatggatcactattgactgaagggtgtctcagaagcctttcgggggacttgaaccggttcccctgtgggatggaggtgcactctggccagagagaactggagagcgtggttgctgtcggcgaagccatggcttttgaaatttccaatgggagccatgagttactgtctcagggacagaagcagatttttattcagacttccgatgggcttatcttgtcccctccaggtacaatagtgtctcaggaggaggacattgtcacagtgactgatgcagaggggcgtgcctgcggatgggcccgctagaaggagttcctctagaagctgtggagtcggtcgtcaccgtggagccagagccctcacagtgaagtggagtcagatcctagattcgtctgattttatccagagaaggtctatggcaagcaatgtatatttttctaatgtgaatattgcacagatgaaccttttatttataaagaataatgtctttctgccctgctgtctacatttttctatggagcttgtcataataatagcagatattacctgatcaggaatccctgtggcgcgtctgacgctcatgagtttttcatgatggtgatgagtagcactgcactgtcacctgatgattggccctgctccgtttcccttctctcctgggagatatgctgcttttccaccagacttgctccatactagaagcttcttttgggttcaattaaaaagaaaataagctagtc

SEQ ID NO: 242 - DNA, 2087 bp, Homo sapiens
  ref <308>: DATABASE ACCESSION NUMBER: NM_018390
gttttttaggaagagtgtcccgcagagacccggcgggagctgccaggagctctgggattccagcggctggaagccacctgggaagcctggcctcagtgtggaagagaaggcagcaggattattacagaaccttgtgaagccaacgcgggcagccgccaggagctgcagaccgagaggatctcgtcctttcttgcggcccagggagaccaggcctttcattctgggctcgagaccaacaattcgaattccgaactccccctgcgtgtgggactcaaggttgcccagggctcacctctgatgggtgggcaggtgagcgcttccaacagcttctcgaggctgcactgcagaaatgccaacgaggactggatgtcggcactgtgtccccggctctgggatgtgcccctccaccacctctccatcccagggagccacgacacgatgacgtactgcctgaacaagaagtcccccatttctcacgaggagtcccggctgctgcagctgctgaacaaggccttgccctgcatcacgcgccctgtcgtgctgaaatggtccgtcacccaggcactggacgtcacagagcagctggatgccggggtgcggtacctggacctgcggatagcccacatgctggagggctcggagaagaacctgcactttgtccatatggtgtacacaacggcgctggtggaggacacactcacggaaatctcggagtggctggagcggcatccacgcgaggtggtcatcctggcctgcagaaacttcgaggggctgagcgaggacctgcacgagtacctggtcgcctgtatcaagaacatcttcggggacatgctgtgtcctcgtggggaggtgccgacactgcggcagctgtggtcccggggccaacaggtcatcgtctcctatgaagacgagagctccttgcgccggcaccacgagctgtggccaggagtcccctactggtggggaaacagggtgaagaccgaggccctcatccgatacctggagaccatgaagagctgcggccgcccaggagggttgttcgtggccggcatcaacctcacggagaacctgcagtacgttctggcgcacccgtccgagtccctggagaagatgacgctgcccaaccttccgcggctgagcgcgtgggtccgagagcagtgcccggggccgggttcacggtgcaccaacatcatcgcgggggacttcatcggcgcagacggcttcgtcagtgacgtcatcgcgctcaatcagaagctgctgtggtgctgacgggacccttctgaagttcgggacgcggcggctgcagtttcacccccgaatttccaaatggagtttcgctctcgttgccgaggctggagtgtagtagtgtgatcctggctcactgcaacctccacctcccgggttccagcaaattctcctgcctcagcctcccaagtagctgggattgcaggcgcccgccaccacgcccggataatttttgtgtgtttagcagagacggggtttcaccatgttggccaggctggtctcgatctcctgacctcaggtgatccacccgcctcggcctcccaaagtgctgggatgacaggcgtgagccaccgcgcccggcctatacctcattttctacatgtcgcttgttggagctgctggttcaagttcccagccagccaatggatgccagcaccatttttactcccctttcccaagcaaatcgtgcatttttgtctaacgagagacatcagtttctcaggatgatcctcaagaacgttatggagtccatgttgcaataggttctctttgggacctaatgactcattttccaaaaatccgcttctacttttggtacccggttgctacggtgaaatgaaggtgccccgcatccagaaagacgcactcctggaccacaaccggcggctacctcagccccacggctctgcaggatcagggctcgggcaggccccgcggagatgaagaatttgcagggagcctccctgacttccgtcggctgtgaatccttgtctgtcaggggcgtatccacaaaatcaccaaattcatacagatcgtttaaataaatgaacatcattaaagtc

SEQ ID NO: 243 - DNA, 2461 bp, Homo sapiens
  ref <308>: DATABASE ACCESSION NUMBER: NM_018410
atgctgggtacgctgcgcgccatggagggcgaggacgtggaagacgaccagctgctgcagaagctcagggccagtcgccgccgcttccagaggcgcatgcagcggctgatagagaagtacaaccagcccttcgaggacaccccggtggtgcaaatggccacgctgacctacgagacgccacagggattgagaatttggggtggaagactaataaaggaaagaaacaaaggagagatccaggactcctccatgaagcccgcggacaggacagatggctccgtgcaagctgcagcctggggtcctgagcttccctcgcaccgcacagtcctgggagccgattcaaaaagcggtgaggtcgatgccacgtcagaccaggaagagtcagttgcttgggccttagcacctgcagtgcctcaaagccctttgaaaaatgaattaagaaggaaatacttgacccaagtggatatactgctacaaggtgcagagtattttgagtgtgcaggtaacagagctggaagggatgtacgtgtgactccgctgccttcactggcctcacctgccgtgcctgcccccggatactgcagtcgtatctccggaaagagtcctggtgacccagcgaaaccagcttcatctcccagagaatgggatcctttgcatccttcctccacagacatggccttagtacctagaaatgacagcctctccctacaagagaccagtagcagcagcttcttaagcagccagccctttgaagatgatgacatttgcaatgtgaccatcagtgacctgtacgcagggatgctgcactccatgagccggctgttgagcacaaagccatcaagcatcatctccaccaaaacgttcatcatgcaaaactggaactgcaggaggaggcacagatataagagcaggatgaacaaaacatattgcaaaggagccagacgttctcagaggagctccaaggagaacttcataccctgctctgagcctgtgaaagggacaggggcattaagagattgcaagaacgtattagatgtttcttgccgtaagacaggtttaaaattggaaaaagcttttcttgaagtcaacagaccccaaatccataagttagatccaagttggaaggagcgcaaagtgacaccctcgaagtattcttccttgatttacttcgactccagtgcaacatataatcttgatgaggaaaatagatttaggacattaaaatggttaatttctcctgtaaaaatagtttccagaccaacaatacgacagggccatggagagaaccgtcagagggagattgaaatccgatttgatcagcttcatcgggaatattgcctgagtcccaggaaccagcctcgccggatgtgcctcccggactcctgggccatgaacatgtacagagggggtcctgcgagtcctggtggccttcagggcttagaaacccgcaggctgagtttaccttccagcaaagcaaaagcaaaaagtttaagtgaggcttttgaaaacctaggcaaaagatctctggaagcaggtaggtgcctgcccaagagcgattcatcttcatcacttccaaagaccaaccccacacacagcgcaactcgcccgcagcagacatctgaccttcacgttcagggaaatagttctggaatatttagaaagtcagtgtcacccagcaaaactctttcagtcccagataaagaagtgccaggccacggaaggaatcgttacgatgaaattaaagaagaatttgacaagcttcatcaaaagtattgcctcaaatctcctgggcagatgacagtgcctttatgtattggagtgtctacagataaagcaagtatggaagttcgatatcaaacagaaggcttcttaggaaaattaaatccagaccctcacttccagggtttccagaagttgccatcatcacccctggggtgcagaaaaagtctactgggctcaactgcaattgaggctccttcatctacatgtgttgctcgtgccatcacgagggatggcacgagggaccatcagttccctgcaaaaagacccaggctatcagaaccccagggctccggacgccagggcaattccctgggtgcctcagatggggtggacaacaccgtcagaccgggagaccagggcagctcttcacagcccaactcagaagagagaggagagaacacgtcttacaggatggaagagaaaagtgatttcatgctagaaaaattggaaactaaaagtgtgtagctaggttatttcggagtgttatttatcttcccacttgctctctgtttgtatttttgttttgtttttgattcttgagactgtgaggacttggttgacttctctgcccttaaagtaaatattagtgaaattggttccatcagagataacctcgagttcttggtgtagaaattatgtgaataaagttgctcaattagaaaaaaaaaaaaaaaaaaaa

SEQ ID NO: 244 - DNA, 1899 bp, Homo sapiens
  ref <308>: DATABASE ACCESSION NUMBER: NM_018492
agcgcgcgactttttgaaagccaggagggttcgaattgcaacggcagctgccgggcgtatgtgttggtgctagaggcagctgcagggtctcgctgggggccgctcgggaccaattttgaagaggtacttggccacgacttattttcacctccgacctttccttccaggcggtgagactctggactgagagtggctttcacaatggaagggatcagtaatttcaagacaccaagcaaattatcagaaaaaaagaaatctgtattatgttcaactccaactataaatatcccggcctctccgtttatgcagaagcttggctttggtactggggtaaatgtgtacctaatgaaaagatctccaagaggtttgtctcattctccttgggctgtaaaaaagattaatcctatatgtaatgatcattatcgaagtgtgtatcaaaagagactaatggatgaagctaagattttgaaaagccttcatcatccaaacattgttggttatcgtgcttttactgaagccaatgatggcagtctgtgtcttgctatggaatatggaggtgaaaagtctctaaatgacttaatagaagaacgatataaagccagccaagatccttttccagcagccataattttaaaagttgctttgaatatggcaagagggttaaagtatctgcaccaagaaaagaaactgcttcatggagacataaagtcttcaaatgttgtaattaaaggcgattttgaaacaattaaaatctgtgatgtaggagtctctctaccactggatgaaaatatgactgtgactgaccctgaggcttgttacattggcacagagccatggaaacccaaagaagctgtggaggagaatggtgttattactgacaaggcagacatatttgcctttggccttactttgtgggaaatgatgactttatcgattccacacattaatctttcaaatgatgatgatgatgaagataaaacttttgatgaaagtgattttgatgatgaagcatactatgcagcgttgggaactaggccacctattaatatggaagaactggatgaatcataccagaaagtaattgaactcttctctgtatgcactaatgaagaccctaaagatcgtccttctgctgcacacattgttgaagctctggaaacagatgtctagtgatcatctcagctgaagtgtggcttgcgtaaataactgtttattccaaaatatttacatagttactatcagtagttattagactctaaaattggcatatttgaggaccatagtttcttgttaacatatggataactatttctaatatgaaatatgcttatattggctataagcacttggaattgtactgggttttctgtaaagttttagaaactagctacataagtactttgatactgctcatgctgacttaaaacactagcagtaaaacgctgtaaactgtaacattaaattgaatgaccattacttttattaatgatctttcttaaatattctatattttaatggatctactgacattagcactttgtacagtacaaaataaagtctacatttgtttaaaacactgaaccttttgctgatgtgtttatcaaatgataactggaagctgaggagaatatgcctcaaaaagagtagctccttggatacttcagactctggttacagattgtcttgatctcttggatctcctcagatctttggtttttgctttaatttattaaatgtattttccatactgagtttaaaatttattaatttgtaccttaagcatttcccagctgtgtaaaaacaataaaactcaaataggatgataaagaataaaggacactttgggtaccagaaaaaaaaaaaaaaaaaaaaaaaaaaaaaaaaaaaaaaaaaaaaaaa

SEQ ID NO: 245 - DNA, 4532 bp, Homo sapiens
  ref <308>: DATABASE ACCESSION NUMBER: NM_018518
gaacgaagaaggcgtcccggcatcggccaagattctacattgctcatctgggcatctgagcctccttcgaagtttcctgtcacaactgtcctcttgacagcatggatgaggaggaagacaatctgtctctgctgaccgcactgctggaagaaaatgagtcagccttggattgtaattcagaagaaaataacttcttgacgcgggaaaatggcgagcccgacgcatttgatgagctctttgatgccgacggcgacggtgaatcttatacagaagaggctgatgatggagaaacaggagagacaagagacgaaaaggaaaatctggccactctctttggagatatggaggacttaacagatgaagaagaagttcccgcatcacagtcaactgaaaatagggtcctccctgctcctgcccccaggcgagagaaaacgaatgaagagttgcaagaggaattaaggaatttgcaagagcaaatgaaggccttacaagagcagctaaaagtaacaacaattaaacagacagcaagcccagcccgtctgcaaaaatcccctgagaagtctccccggccacctcttaaggagaggagagttcagagaattcaggagtcaacatgcttttctgcggagcttgatgtccctgcgctaccaagaaccaagagggtggctcgaacaccaaaggcttcacctccagatcccaaaagctcatcttcaaggatgacaagtgcaccctcccaacccctacagacgatttctcggaacaaacctagtgggataactagaggtcaaattgtggggaccccaggaagttctggggaaacgactcaacccatctgtgtggaagccttctctggtctgcggctcaggcggcctcgagtatcctccacagaaatgaacaagaaaatgaccggccgaaaactgatcagactgtctcagatcaaggaaaagatggccagagagaagctggaagaaatagattgggtgacatttggggttatattgaagaaggttacgccacagagtgtgaatagtggaaaaaccttcagcatatggaaactgaatgatcttcgtgacctgacacaatgtgtgtccttgttcttatttggagaagttcacaaagcgctctggaagacggagcaggggactgtcgtagggatcctcaatgccaaccccatgaagcccaaggatggttcagaggaggtgtgtttatctatcgatcatcctcagaaggtcttaattatgggtgaagctcttgacctgggaacctgtaaagccaagaagaagaatggagagccgtgcacgcagactgtgaatttgcgtgactgtgagtactgtcagtaccatgtccaggctcagtacaagaagctcagcgcaaagcgtgcggatctgcagtccaccttctctggaggacgaattccaaagaagtttgcccgcagaggcaccagcctcaaagaacggctgtgccaagatggcttttactacggaggggtttcttctgcctcgtatgcagcttcaattgcagcagctgtggctcctaagaagaagattcaaaccactctgagtaatctggttgttaagggcacaaacttgatcatccaggaaacacggcaaaaactcggaataccccagaagagcctgtcttgctctgaggagttcaaggaactgatggacctgccgacgtgtggagccaggaacttaaaacaacatttagccaaagccacagcttcagggattatggggagcccaaaaccagccatcaagtccatctcggcctcagcactcttgaagcaacagaagcagcggatgttggagatgaggagaaggaaatcagaagaaatacagaagcgatttctgcagagctcaagtgaagttgagagcccagctgtgccatcttcatcaagacagccccctgctcagcctccacggacaggatccgagttccccaggctggagggagccccggccacaatgacgcccaagctggggcgaggtgtcttggaaggagatgatgttctcttttatgatgagtcaccaccaccaagaccaaaactgagtgctttagcagaagccaaaaagttagctgctatcaccaaattaagggcaaaaggccaggttcttacaaaaacaaacccaaacagcattaagaagaaacaaaaggaccctcaggacatcctggaggtgaaggaacgtgtagaaaaaaacaccatgttttcttctcaagctgaggatgaattggagcctgccaggaaaaaaaggagagaacaacttgcctatctggaatctgaggaatttcagaaaatcctaaaagcaaaatcaaaacacacaggcatcctgaaagaggccgaggctgagatgcaggagcgctactttgagccactggtgaaaaaagaacaaatggaagaaaagatgagaaacatcagagaagtgaagtgccgtgtcgtgacatgcaagacgtgcgcctatacccacttcaagctgctggagacctgcgtcagtgagcagcatgaataccactggcatgatggtgtgaagaggtttttcaaatgtccctgtggaaacagaagcatctccttggacagactcccgaacaagcactgcagtaactgtggcctctacaaatgggaacgggacggaatgctaaaggaaaagactggtccaaagataggaggagaaactctgttaccaagaggagaagaacatgctaaatttctgaacagccttaaataacccgaacttcagacattttcccacagacttcctggcctcctgtgactctggaaagcaaaggattggctgtgtattgtccattgattcctgattgacgccgtcaaaaacaaatgcttgttaagcccataagctttgcctgcttactttctgccattgggttggtttgataccacatttaacattgacatttaagtggaaaaccaagttatcattgtcttttctaagctcagtgtggatgattgcattacttcattcactgaagtttttgcccaaaaattggaaggtaaacagagagctatgtttctgtatcttttggttatagagtgttcacttctttatcataacaaaattctagtgtttatacgaacacccagaggcaaaagaatttggcttaattctcactccaggtaagtagcttaacttctgggcttcagttttctcatctgtaaaatcaggaagattggactaagtgatcctgaaatgtattttttagcactggatttctacaaataataaaactttcccatctagataatgatgatcacatagtcttgatgtacggacattaaaagccagatttcttcattcaattctgttatctctgttttactctttgaaattgatcaagccactgaatcactttgcatttcagtttatatatatagagagaaagaaggtgtctgctcttacattattgtggagccctgtgatagaaatatgtaaaatctcatattattttttttttaatttttttattttttatgacagggtctcactatgtcaccctggctggagtgcagtagtgcgatcgcggcacactgcagccttggcttccctgggctcaagcagtcctcccacctcagtctcccaaatagctaggactacaggcgtgcgtgaccaagcccagctaatttttgcattttttgtagagatggggttttgccatgttgctcaggctggtctcaaactcctgagcactagcaatccacccacctctgtttccaaaaaaaaaaaaaaaatgaaaggtcaacccctatgcaaattaccacagcaaaggtttcattcaggagattcttccatctgggcaacctggttttccaaatatcatttgacctaagtgaatgttgatactagctaaagattgggtaaattggttgaattattgtattgaagcttgagctgtagctaaaagtaatttaggtttcccctaagatgttattatgttagggacataacacttttgggaggttgttgtgggagatggttgatttaggttttcaaaagctagaaataaaatttacatgccttagatttcataaaattctgctctaattgggtggaaggtgctgtatctaacttgtgttcctcctaaggttatgtcctaataactattcttttaggagtatacttctactttatagaaggttgcttttctttttaattttttctaacaaagaaaagaataaagtatttattaataagaaccagaaagcacttgaaactgatgtttttaatggctcatttagggtagatttatttatctcattaacttaaaacagctatgtgtatgaaataggtcacaacagaacttgaacaccaggttggtgtctgagcaatccctttcttatgggaaaaacaatgttcttgtttgaacagagggtatcattgcagtcagtattcacgtgtatattgttatataagttgtataatatgcttgtaaaggctgagggtgagctgtatctggatgcctttttacaatttgattttaacttttaaaataaatttaaaacataaaaaaaaaaaaaa

SEQ ID NO: 246 - DNA, 632 bp, Homo sapiens
  ref <308>: DATABASE ACCESSION NUMBER: NM_018655
cttcctcggaactgttgcccacatgcagccccggacacagcccctagcccaaaccctacccttcttcctcggaggggcccctcgagacactgggctgcgggtgcctgtcattaagatgggcacagggtgggagggcttccagcggaccctgaaggaagtcgcctacatcctcctctgctgctggtgtatcaaggaactgctggattaatggtagcagggaactgcctcctctccccaccagcaccatggctggcatcgctcagcccccagcccaattgccatcaagactcctgaagccagctgtgcttgaccaaggatgggccataaacaatgagtaaacagtaaagtgtggatcctgctttgagctgtgtcatctagcagacctgcctcatctctgagcctccttcattcccaacccctgcctctggtggacctctggtgggcaggagcttggactgctctggctaggaccccagtaagattgtggcaagacctggcactcctccaagcttggcacagtgagcccaccagctcagatggttgatcttaccataccctcatagtaccaagaatggactgccccctaagaaacctgtttgagaatcactgaattaaaaatataatccataggc

SEQ ID NO: 247 - DNA, 999 bp, Homo sapiens
  ref <308>: DATABASE ACCESSION NUMBER: NM_018659
gggcgaggctgcaccagcgcctggcaccatgaggacgcctgggcctctgcccgtgctgctgctgctcctggcgggagcccccgccgcgcggcccactcccccgacctgctactcccgcatgcgggccctgagccaggagatcacccgcgacttcaacctcctgcaggtctcggagccctcggagccatgtgtgagatacctgcccaggctgtacctggacatacacaattactgtgtgctggacaagctgcgggactttgtggcctcgcccccgtgttggaaagtggcccaggtagattccttgaaggacaaagcacggaagctgtacaccatcatgaactcgttctgcaggagagatttggtattcctgttggatgactgcaatgccttggaatacccaatcccagtgactacggtcctgccagatcgtcagcgctaagggaactgagaccagagaaagaacccaagagaactaaagttatgtcagctacccagacttaatgggccagagccatgaccctcacaggtcttgtgttagttgtatctgaaactgttatgtatctctctaccttctggaaaacagggctggtattcctacccaggaacctcctttgagcatagagttagcaaccatgcttctcattcccttgactcatgtcttgccaggatggttagatacacagcatgttgatttggtcactaaaaagaagaaaaggactaacaagcttcacttttatgaacaactattttgagaacatgcacaatagtatgtttttattactggtttaatggagtaatggtacttttattctttcttgatagaaacctgcttacatttaaccaagcttctattatgcctttttctaacacagactttcttcactgtctttcatttaaaaagaaattaatgctcttaagatatatattttacgtagtgctgacaggacccactctttcattgaaaggtgatgaaaatcaaataaagaatctcttcacatg

SEQ ID NO: 248 - DNA, 810 bp, Homo sapiens
  ref <308>: DATABASE ACCESSION NUMBER: NM_018944
ggggcgcgggcgatttgtaggtaatggcaggcgttcggtcactgaggtgtagcagaggatgcgctggcggctgtgagtgcggcgacaagggcaaatgcagcgactcctcgctgttgggcaagagactctccgaagactcgagccgccaccagctgttgcagaagtgggcgagcatgtggagctccatgagcgaagacgcgtcggtggccgacatggagagggcgcagctggaggaggaggcggcggctgcggaggagaggccgctggtgttcctgtgctccggctgccggcggccgctgggcgactcgctgagctgggtggccagccaggaggacaccaactgcatcctgcttcgctgtgtttcctgtaatgtttctgtggataaggaacagaagctatccaaacgtgaaaaggaaaatggttgcgtccttgagactttgtgctgcgcggggtgctcactcaatcttggctacgtgtacagatgcacgcccaagaatcttgattacaagagagacttgttttgcctcagtgttgaagccattgaaagttatgttttagggtcctctgaaaagcaaattgtgtcagaagataaagagctttttaatcttgaaagcagagttgaaatagaaaagtctctaacacagatggaagatgtcttgaaagcattacaaatgaagctgtgggaggccgaatccaaattgtcctttgccacttgtaaaagctgaactctagtctgtgtcctccattctgcccccgcccttcctccccttatttgttaaatgaagcaacatagtgagacgtcgtctctac

SEQ ID NO: 249 - DNA, 1483 bp, Homo sapiens
  ref <308>: DATABASE ACCESSION NUMBER: NM_019013
cttagtggtgtcggggtctagtggacagagaagactcttggccaggcagatggcttctcggtggcagaacatggggacctccgtgcgccggagatctctccagcaccaggagcagctggaggacagcaaggagctgcagcctgtggtcagccatcaggagacctctgtaggggccctggggtccctgtgcagacagttccaaaggaggctgcccctgagaaccgtcaacctcaacctccgcgcagggccctcctggaaacgcctggaaaccccagagccaggtcagcagggcctccaggctgcagctcgctcagctaagagtgctttgggtgccgtgtcccagagaatccaggagtcctgccaaagtggcaccaagtggctggtggagacccaggtgaaggccaggaggcggaagagaggagcacagaagggcagtggatccccaactcacagcctgagccagaagagcacccggctgtctggagccgcccctgcccactcagccgcagacccctgggagaaggagcatcaccgcctctctgtccggatgggctcacatgcccacccattacggcgatcaaggcgggaggctgccttccggagcccctactcctcaacagagcccctctgctctcccagcgagtctgacagtgacctagagcctgtgggggcgggaattcagcatctccagaagctgtcccaagagctagatgaagccattatggcggaagagagtggtgacatcgtctctctcattcatgactgaggaagtgcctgcaggaaacaagccctgtctgaccgccaaggcttcatactcaaggatgtctatgcttccccgtgtgcttcctggaaaaaacccccgggagtcgtcagtacccctgggccactgctaacaagcacctaacaaggggcccagagccccctgctccagccacatctggacccatcagtgactgcctgccatagcctgagagtgtcttggggagaccttgcagagggggagaattgttccttctgctttcctaggggactcttgagcttagaaactcatcgtacacttgaccttgagccttctatttgcctcatctataacatgaagtgctagcatcagatatttgagagctcttagctctgtacccgggtgcctggtttttggggagtcatccgcagagtcactcacccactgtgtttctggtgccaaggctcttgagggccccactctcatccctcctttccctaccagggactcggaggaaggcataggagatatttccaggcttacgaccctgggctcacgggtacctatttatatgctcagtgcagagcactgtggatgtgccaggaggggtagccctgttcaagagcaatttctgccctttgtaaattatttaagaaacctgctttgtcattttattagaaagaaaccagcatgtgactttcctagataacactgctttctcataataaagactatttgcatttg

SEQ ID NO: 250 - DNA, 1579 bp, Homo sapiens
  ref <308>: DATABASE ACCESSION NUMBER: NM_020397
tcccgccgcctctgcgcccgcgccgcgcccccggcgccccctccccagcgcgcccccggccgctcctccgcgccgcgctcgtcggccatggcccgggagaacggcgagagcagctcctcctggaaaaagcaagctgaagacatcaagaagatcttcgagttcaaagagaccctcggaaccggggccttttccgaagtggttttagctgaagagaaggcaactggcaagctctttgctgtgaagtgtatccctaagaaggcgctgaagggcaaggaaagcagcatagagaatgagatagccgtcctgagaaagattaagcatgaaaatattgttgccctggaagacatttatgaaagcccaaatcacctgtacttggtcatgcagctggtgtccggtggagagctgtttgaccggatagtggagaaggggttttatacagagaaggatgccagcactctgatccgccaagtcttggacgccgtgtactatctccacagaatgggcatcgtccacagagacctcaagcccgaaaatctcttgtactacagtcaagatgaggagtccaaaataatgatcagtgactttggattgtcaaaaatggagggcaaaggagatgtgatgtccactgcctgtggaactccaggctatgtcgctcctgaagtcctcgcccagaaaccttacagcaaagccgttgactgctggtccatcggagtgattgcctacatcttgctctgcggctaccctcctttttatgatgaaaatgactccaagctctttgagcagatcctcaaggcggaatatgagtttgactctccctactgggatgacatctccgactctgcaaaagacttcattcggaacctgatggagaaggacccgaataaaagatacacgtgtgagcaggcagctcggcacccatggatcgctggtgacacagccctcaacaaaaacatccacgagtccgtcagcgcccagatccggaaaaactttgccaagagcaaatggagacaagcatttaatgccacggccgtcgtgagacatatgagaaaactacacctcggcagcagcctggacagttcaaatgcaagtgtttcgagcagcctcagtttggccagccaaaaagactgtgcgtatgtagcaaaaccagaatccctcagctgacactgaagacgagcctggggtggagaggagggagccggcatctgccgagcacctcctgtttgccaggcgctttctatacttaatcccatgtcatgcgaccctaggactttttttaacatgtaatcactgggctgggtgcagtggctcacgcctgtaatcccaacactttgggaggctgaggcaggaggactgtttgagttcaggagttttaagaccagcctgaccaacatggtgaaaccccatctctactaaaatataaaaattagccgggtgtggtggcgagcacctgtaatgtcagctacttgggaggctgaggcaggagaatcacttgaacccaggaagcggaggttgcaatcagctgagatcacaccactgcactccagcctgggtgacagattgagactccctctcaaaaaaa

SEQ ID NO: 251 - DNA, 1375 bp, Homo sapiens
  ref <308>: DATABASE ACCESSION NUMBER: NM_020675
gtttgaaatcggaaagttggcggggctgcgggagctgagcctagagtccggctgttggctagagtgggcgcggatctggtgtggggaaggcggcgggactcaggcctgcctgcgaagcattgtcctacataatggtagaggacgaactggcacttttcgataaaagcataaatgaattttggaataaattcaaaagtacggacacctcctgtcagatggcgggactaagagatacctacaaggattccatcaaagcatttgcagaaaagctgtctgtgaaattaaaggaagaagaacgaatggttgagatgtttctggaatatcaaaatcagatcagcaggcaaaataagctcattcaagaaaaaaaggataacttgttaaaattgattgctgaagtaaaaggcaaaaagcaggaattggaagtactgactgcaaatatccaggatcttaaggaagaatattctaggaagaaggaaactatttctactgctaataaagcgaatgcagagaggttgaaaaggctgcagaaatctgcagacttgtataaagatcgacttggactagaaattcgaaaaatttatggtgagaaattgcagtttattttcactaatattgaccctaagaatcctgagagcccatttatgttttccttacatctcaatgaagcaagggactatgaagtgtcagatagtgcccctcatcttgagggcctagcagaatttcaagagaatgtaaggaagaccaacaatttttcagcttttcttgccaatgttcggaaagcttttactgccacggtttataattaacatacaaatagtgtatataaaaacggtttatttttcttctctattacatatctctttttttcttgtttttattattattatactttaagttttagggtacatgtgcacaatgtgcaggtttgttacatatgtatacatgtgccatattggtgtgctgcacccattaactcgtcatttcattaggtatatctcctaatgctatccctcccccctcccccaacccacaacagtccccgttgtgtgatgttccccttcctgtgtccatgtgttctcattgttcaattcccacctaggagtgagaatatgtggtgtttggttttttgtcctttcgatagtttgctgagaatgatggtttccagcttcatccatgttcctacaaaggacatgaactcatccttttttatggctgcatagtattccatggtgtatatgtgccacattttcttaatccagtctatcattgttggacatttgggttggttccaagtctttgctattgtgaatagtgccgaaataaacatacgtgtgcatgtgtctttaaaaaaaaaaaaaaaaaaaaaaaaaaaaaa

SEQ ID NO: 252 - DNA, 2948 bp, Homo sapiens
  ref <308>: DATABASE ACCESSION NUMBER: NM_020980
aggtaatgattaatctgtcaggcacaaaagggattgttttggggatttcgggttctaagtcgcagattcaaacaaatagcagcgaacagggaatgacagttccaccagaagacgattaagccacagcctctaattggaacggcatttgtacagtcagagactcttaccagacatctccaggaatctgtgagccattgtcaaaacgtccattttcatctggctgtgaaagtgaggaccacaacaggtaggtattggtagaaacaggagtcctcagagaagccccaagatgcagcctgagggagcagaaaagggaaaaagcttcaagcagagactggtcttgaagagcagcttagcgaaagaaaccctctctgagttcttgggcacgttcatcttgattgtccttggatgtggctgtgttgcccaagctattctcagtcgaggacgttttggaggggtcatcactatcaatgttggattttcaatggcagttgcaatggccatttatgtggctggcggtgtctctggtggtcacatcaacccagctgtgtctttagcaatgtgtctctttggacggatgaaatggttcaaattgccattttatgtgggagcccagttcttgggagcctttgtgggggctgcaaccgtctttggcatttactatgatggacttatgtcctttgctggtggaaaactgctgatcgtgggagaaaatgcaacagcacacatttttgcaacatacccagctccgtatctatctctggcgaacgcatttgcagatcaagtggtggccaccatgatactcctcataatcgtctttgccatttttgactccagaaacttgggagcccccagaggcctagagcccattgccatcggcctcctgattattgtcattgcttcctccctgggactgaacagtggctgtgccatgaacccagctcgagacctgagtcccagacttttcactgccttggcaggctgggggtttgaagtcttcagagctggaaacaacttctggtggattcctgtagtgggccctttggttggtgctgtcattggaggcctcatctatgttcttgtcattgaaatccaccatccagagcctgactcagtctttaaggcagaacaatctgaggacaaaccagagaaatatgaactcagtgtcatcatgtagtggcatgctcagctctggatttgcagtcagtttgggattctcttcagaaagatggcatctaagtgtctgtgttcttgtaagcctgaggtggaatccacccagttttgtctgctagccatatgggacatctaattggaaaagcatctgcataaaagtttggaaacaatgaccacttctctaccattgtcccccaccccaccccccagaataacgctgactgtcccctgaaacagccttctctcctgccctgtttatttcatcctcgatgggaattcttgctaggtaagcactaataactcggcatcttgacgatagtcccatttgggtggtttcagctgcactatctgtatgaaatggtgtcaccaaaacccttttcttcagtatcgacaaagattacattctgagtaccaaccaaaccctaaattgaaagacaaaactatggtttcagtcaacatattcatgaattagggagctaatgggttaagcttccagttcccgctatgctactggatttgtataaatactgatattctccaaacctagtggtgtagggagcaagagaatgcagctggaaggcacaaggggaggacattgtggcattcagaaactgcaggagacaagatgaatttgagaagccaaatggaatttttaatggaaaccatttatcagattaatctcttgctctcctgcattttagaggacaccaattaatttcctggtctttagtatataataacctaaaataccattgtaacctcagtcatgaaaaatacatcactctgtctttttagctcaaatgtattttcctaattgcccacttgagaacagacatttgacaagttatatcaacgactgtgcttgtccattattttacacatgccctagaagccaaaactgaaagccactggatcctggtctagctgaatcttcagagtgggaggtctccaaaaagatattaccttattgggcttaacaattcacaaggcactttcacacccattatctaatttaatcctcataatgactatgtgaggcaaatgccacattgcccatttttcagataaagaaacaaaatcttagggaagataagttgagttgtccaagagcacactgaaagttgaatgttatctaatgcattcctctacctttcagaagatcagtagctggctgagaatctttgccaaatcttccttgctagccagaagtggaattggcagcttctagaatatgtacacctctggacaaaatgttcctcaatcttaagatacaaagaccctcattgtctgggtctattcccacacttactgagtacagatgaaggaaagtggtagcaatttaatcataactttcatttgctgaaaaacattatgagaaggcctcccttcctaagccacctctggtcttgctaagtcttgatcttgcttcctgccagcaccaaacattacattcaggggatttcctctggctcagtcttttccccttgaagttctctaatagatgttacttttgacaaaagatcgcctatgagttacaagcaccaggggatgctctacatcaagggatgcaccttcagtcaaactgtcaaaaagcccagaattcccaaaggcattaggtttcccaactgctttgtgctgatatcagaacagcagaaattaaatgtgaaatgtttctgatgacttatgttctacaatctatggacatacgggatttttttttcttgctttgaagctacctggatatttcctatttgaaataaaattgttcggtcattgtt

SEQ ID NO: 253 - DNA, 1528 bp, Homo sapiens
  ref <308>: DATABASE ACCESSION NUMBER: NM_020990
ccggctcccattccggctccagcctccaatccgacccccatttcggctgcagcctcggacctagctccggccctcggtctatccggttgcatcctccctccctgttccggatcttatcttgcgccagcgcctactccaggatcccgtagccagacctcaagccatggctggtcccttctcccgtctgctgtccgcccgcccgggactcaggctcctggctttggccggagcggggtctctagccgctgggtttctgctccgaccggaacctgtacgagctgccagtgaacgacggaggctgtatcccccgagcgctgagtacccagacctccgaaagcacaacaactgcatggccagtcacctgaccccagcagtctatgcacggctctgcgacaagaccacacccactggttggacgctagatcagtgtatccagactggcgtggacaaccctggccaccccttcatcaagactgtgggcatggtggctggagatgaggagacctatgaggtatttgctgacctgtttgaccctgtgatccaagagcgacacaatggatatgacccccggacaatgaagcacaccacggatctagatgccagtaaaatccgttctggctactttgatgagaggtatgtattgtcctctagagtcagaactggccgaagcatccgaggactcagtctgcctccagcttgcactcgagcagagcgacgagaggtggaacgtgttgtggtggatgcactgagtggcctgaagggtgacctggctggacgttactataggctcagtgagatgacagaggctgaacagcagcagcttattgatgaccactttctgtttgataagcctgtgtccccgttgctgactgcagcaggaatggctcgagactggccagatgctcgtggaatttggcacaacaatgagaagagcttcctgatctgggtgaatgaggaggatcatacacgggtgatctccatggagaagggtggtaacatgaagagagtgtttgaaagattctgccgaggcctcaaagaggtggagagacttatccaagaacgtggctgggagttcatgtggaatgagcgtttgggatacatcttgacctgtccatctaacctgggcactggacttcgggcaggagtgcacatcaaactgcccctgctaagcaaagatagccgcttcccaaagatcctggagaacctaagactccaaaaacgtggtactggaggagtggacactgctgctacaggcggtgtctttgatatttctaatttggaccgactaggcaaatcagaggtggagctggtgcaactggtcatcgatggagtaaactatttgattgattgtgaacggcgtctggagagaggccaggatatccgcatccccacacctgtcatccacaccaagcattaactccccatcgccagctgatgactcaagattcccaggagttttgctcattctaatgatggcccattctacttgctctggacctgcccccgcatcccctgcctccatcctagt

SEQ ID NO: 254 - DNA, 564 bp, Homo sapiens
  ref <308>: DATABASE ACCESSION NUMBER: NM_021052
cattctttttctttattcagtggattgttagttcttctgctgttaggaagccactatgtctggacgtggaaagcaaggcggcaaagctcgggcaaaagctaaaacgcgttcttccagggccggtcttcagtttccagttggccgtgtgcaccgcctcctccgcaaaggcaactactccgaacgagtcggggccggcgctccagtgtacctggcagcggtgctggaatatctgacggccgagatcttagagctagctggcaacgcggctcgcgacaataagaagacccgcatcatcccgcgccacctgcagctagccatccgcaacgacgaggagctaaataagcttctaggtcgcgtgaccatcgcgcagggcggtgtcctgcccaacatccaggccgtattgctgcctaagaagacggagagccaccataaggccaagggcaagtgaaatgattactagtcaaatccgtcagtgatcccgagtcccagaaaccaaaggctcttttcagagccacccaccttttctgtaaagtgctggaatacacatacgatgcctgaaatctc

SEQ ID NO: 255 - DNA, 2267 bp, Homo sapiens
  ref <308>: DATABASE ACCESSION NUMBER: NM_021064
tgtggttgctcgtagtgagttgcgctcgctatgtctggacgtggcaagcagggaggcaaagcccgcgctaaggccaagactcgctcttctagggccggtctccagttccccgtgggccgagtgcaccgcctgctccgcaaaggcaactatgccgagcgggtcggggccggcgcgccggtgtatctggcagcggtgctggagtacctgaccgccgagatcctggaactggcgggcaacgcggcccgcgacaacaagaagacccgcatcatcccgcgtcatctccaactggccatccgcaacgacgaggagctcaacaagctgctgggcaaagtcaccatcgcacagggcggtgtcctgcccaacattcaggccgtgctactgcccaaaaagactgagagccaccacaaggcgaagggcaagtaactatctgtactagtttgtggcagctcaagtaaaatcgagtccaaaccaacggctcttttcagggccacccacgtcttctctaaaagaacttaacatttattccatgtgaaagaaagtgagacatggacaagactctagtcataaattacccatctttttgaaaacagtgtagcgaacaccgcagatttaaaagaaaaactagagggaaggtggtccagattttaccacgcttaaaagttaagatgtgaacaaatctcttaggccattacttaattttaaacttaatcagtgtgtgtccacagagcaccagtggcttcgtgagttcttgaagcactttggcccaaaagagttatcgcccgggctagaatttagcagacagctgttccacgcgggccagggcggcatgaagaagtcccgccgctacgtgcccggcacagtggccctgcgcgacgttcggcgctaccagaactccgagctgctgatcagcaagctgccgctcctgcgagagctcggcggtgacgccgctgcacgagagcgaggctgaagaactttgtgacacaatagtccacctccctgcaaaggctctgtcagagactcacatctttcctgatggatagctgtgaagcattctcttacccaccctactgcatgttgcaaagtattcctttaaaatgaagtgagtaaaatactgggatgacgttatctggagcccaagaaagatggctcatttggaaaggcctaatatcccaagttgcttacctagaagaacttgacaggatagttaataataaaccttaaaacccatgaagaaatctgaggtaaagtgttagcacacagactgttaaaatgtctgcctcacagataggagggaaaatatatagaggattataatatggttcaacaaatgttgatgagtattagaaatgtacattagaaatattagaaatgtttatgactattagaaaagtacagggtattgggcgttcctgacacaaactgaggcctcctagcaagactggcagttttctgtaaaggagggttatttactacggtagtgcaaataacttttggtgttgtagctaaataaggaatactcatgccaagattgcacaattgtgcctcctccctctgttcactgaactctgatgtaattttttttttttttttgagacggagtctcgctctgtcgcccaggctggagtgcagtggcgctatctcggctcactgcaagctccgcctcccgggttcacgccattctcctgcctcagcctcctgagtagctggggctacaggcgtctgccaccatgcccagctacttttttgtatttttagtagatacggggtttcaccgtgttagccaggatggtcttgatgtcctgacctcgtgatccaccggcctcggcctcccaaagtgctgggattaccggcgtaagccaccacgcccggcccactctgaagtaatcttaagaagacgttaactcatttttcttgtgtattgtagacacttttggctgtctggtaacatggaaaatctcagaatgatgttttaagtatataaaatgccaaacaaagttaaattacagttatcaaagtatttttaaaacttcatagtgataaatgagactatatagttatattgttaatatagttaacacattacatgatttggtgagcctaattgctgttactaattagaggagtaaaaatgtttcacgataactcagcaattgtaatgagaaatgaaacatctaatgtcttttgggttacaaagtaacaggtactgagatttgtggcctaaattcataataaagtgaaatgttcaagttcaaaaaaaaaaaaaaaaa

SEQ ID NO: 256 - DNA, 392 bp, Homo sapiens
  ref <308>: DATABASE ACCESSION NUMBER: NM_021128
agtctgggacgcgccgccgccatgatcatccctgtacgctgcttcacttgtggcaagatcgtcggcaacaagtgggaggcttacctggggctgctgcaggccgagtacaccgagggggacgcgctggatgccctgggcctgaagcgctactgctgccgccggatgctgctggcccacgtggacctgatcgagaagctgctcaattatgcacccctggagaagtgaccacgctgaaacccacccacccgctgtgctgaccatgggccctgagcgtcctaccccgaattcacgaggctgaggcatccgggagctggcgtaatgcctggccgcagtgtgtgtgtatcccataccccactctggaaggaaccatccagtaaaggtctttcagaacc

SEQ ID NO: 257 - DNA, 3933 bp, Homo sapiens
  ref <308>: DATABASE ACCESSION NUMBER: NM_021183
gggaaacccttccgggtgtgtgcttggtgggggtgggggtgggggtgggggtgggggtggggggtgggtgagaaaaaaaagaggtgggttcgcctggagtccctgcggccgccgcggaaggcccccgcttctttccccgcggcgagcagcagcgctggggcagcggagagacagaggagccagcgggtggccatggccttggcgtgacagagcctccccggcggccgggcgggtgcggacggcggggccggacgacccccgcgggagccggggcccagaaacccgcccgggcagcggtaactggaacggagccctcaggcctgagccggctgggctgcgcgagcaggaagcggggtccctgggcccctttgtgtgaagggcgggggaggagtgccgggcagccccgggctgcgggctcctccgacgtccgcctcgccgcagggtcccctcgccgcagcccccaccctttccctcccgggggcacgcgcctcctcgccaccctcgccgggcttttcccaggctcgccctcctccccacgccccctgctcgggctgcagttcctataggaagggcattaccatcccttccccaccctccccgactctacgctctttcccctccccctcctgtaacttcctcttcttccccggttgggccctctgctcctctgcactctcctccccagttcgcagatttccgcccaccttccgcctcgtctagccgcgccacagctagcggggtgatctttccccccctctggtaggagttggtgaaggtgagactcatgagggaatacaaggtagtggtgttagggagtggaggggttggcaaatctgcccttactgtgcagtttgtcactgggactttcattgagaaatatgaccccaccattgaagatttctaccgcaaagagatcgaagtggactcttccccctccgtgctggaaattctggacaccgcaggaactgagcagtttgcctccatgagagatctctacatcaaaaacggccaaggtttcatcctggtttatagcctggttaatcaacagtcttttcaggatatcaagccaatgagagatcaaattgtcagagtgaagagatatgaaaaagtcccactaatcctagtaggaaataaagtggatctggaaccagaaagagaggttatgtcttcagaaggcagagctctggctcaagaatggggctgtcctttcatggagacatcggcaaaaagtaaatcaatggtggatgaactttttgctgagatcgtcaggcaaatgaactattcatccctgccggagaagcaagatcagtgttgtacaacttgtgtcgtccagtaaagaagataacctcaatcatggccataccgagcagataaaactcagaggaaatttgcacagatgctgctttggagaactttacaacctgggttgcagaactgagccttggtaaacctgtctctattacagcatgttgccatacatctatttaagtgcataaggtctttggccttcaagatccatcgaccttaaacaggaatgcttagcacgtttaccatacgtttaaaatccattctttatcaatcagtccttttatagctttctaagttcttattgatggctaatatacaagggttaatttttaatattttaattgatttctttaatcagtttctcgacttgtatttattaaatactcaaactcagtattacctactcaatgccttttaaaagaaagttataatggagaaaaaattgagccttaaacaaatggttacttctgtatattacctcgtaccagtgcttcatcctatttgtaaaatctttctcctttaaaattattggttaatactttgagactttgtttacgtgtggcagtgttgtaaaaagaaactaaagatcacattttacctgtatggatggaatatcccttttcttcaagtgcagtttgtgatgtgttttgtttttttttttttttttttgtaattaacatgttctgaaggttacaattgatatttgaaattgactgtagagcatttagttgaagagttaagcattcagttccattaggttttcacatgtgttaatctcatttacagcattgaattgcggcagtaacattttcctttctgtgaagttctaaatttagttatgacctatttagcaatgcctttgaaaagggatattgtatccatggtaaattaattgtatacctaaacagagatagctcatctttgcctatcaggcttgtaattgacatctagtagacttctgcacatgtaaaattgaattcaaataaaatcatacacactttctagttcttaatatttgtctttctgaataatagtttaaagcaatatttgttaaagttttcttgcactatcacaattgctttttagttatttctcaagaagcatgttcgtattagagacaaaatctgtgtaacaggagggagaatagcgccaagtctctgggctattttttatttttgcaaatgtgctttctaatagccattgccttccatgttgtttacctaatcagcatatttttgtctgaatacttgaacattttaacagtaacgcaggtgtagaatcagaaaggaaacttatgcagagtaatattttggttcagttttaacatcgtgacaatgagggctttttctagcaatgatttttaaattgtgtaagtttgacagtattttattgttgggtttttatttgattttagttgtgtgcttttcatttgcagaagttagtaactgcagctcacctactgcaccaaagttctcgattttaggagcccagctttagtcatttgaacatgcttctaaataaaataaaacaaaaccaaaactatacttttgatctataataagagctcaataactttgtcaaggaaagctctaatatatgcagtgatggtttatgaaagggtgtggcaattttaaatttatattgtgtgtgatgttcaaataaagtggtatctacattcatgtgatttatgggtcagcatgaccattaattactgagtagaaattgactaaactttgatttcctttttttaaatcgtgttgcatttgattcctgagcaaattccctcaaagtgaactcttgttcttaaattttgaattttatggtgagattgtaaagatagaggcaattgaaacattgttccttatttatgaactgcttgaagtgaatacttaatttaagtttgcactttaataccaaacttaaaaccaaacactcatttaaaagtaggttaagtgatcatggatcattgttattagctttgtggctttgtgaaattctaaaggaatcaaataattcatcatgatttaaattttctagagattttgatttttttataatgtttctttcctgtagattgtgttcttgtttctctctctctctctctctctctctctctctctctctctctctctctctctctctcaaaattacagtgttcattgtcattgacctcagcagcaaatttgacttgaattcacttaggatcgcaggaatcaggggaaagtgattttaaaggtggtttctccagcacattttaagaaaagggaccaaaagttattttagcttcctcaatagattgcatgttgcttattaggataataaattaatattaaatgcaatatatgtcttgtctttattatggcatctatttaggagttgttcaaatcactgcagtagggctctgcaaataaaataatgtaacctattatcatggatctaatgtactgtaactttatcagtgaaaggtaaaatctcaaataacaagtacaaacattgaacaattacctataaagatttgtaaaagtaaaatttttccaatagatttcattcttgtcattttgtaagacgaccctgcagtccacctgtttgtaacttttttaataaaatagacatctgtattactga

SEQ ID NO: 258 - DNA, 947 bp, Homo sapiens
  ref <308>: DATABASE ACCESSION NUMBER: NM_021225
aattgagtatctggcaagagtaagattaagcagtaatttgttccaaagaagaatcttctaccaaggagcaactttaaagaatgaaattaactttcttcttgggcctgttggctcttatttcatgtttcacacccagtgagagtcaaagattctccagaagaccatatctacctggccagctgccaccacctccactctacaggccaagatgggttccaccaagtcccccacctccctatgactcaagacttaattcaccactttctcttccctttgtcccagggcgagttccaccatcttctttctctcgatttagccaagcagtcattctatctcaactctttccattggaatctattagacaacctcgactctttccgggttatccaaacctacatttcccactaagaccttactatgtaggacctattaggatattaaaacccccatttcctcctattcctttttttcttgctatttaccttcctatctctaaccctgagccccaaataaacatcaccaccgcagatacaacaatcaccacaaatccccccaccactgcaacagcaaccaccaggcacttccacaaaacccacaatgacgatcagctcctcaacagtacctatctcttcaacaccagagcctgccacctccatatcagcagcaacccccgcagcatctactgaaaatactactcaaattctcgccaaccgtcctcacacagtattgctcaatgccactgtccaagttacgacttccaaccaaactatattaagcagcccagcctttaaaagtttttggcaaaaactctttgccatttttggttgaacatgcaataaatgatattttccaaactgctctgatatcttagaagaaataaactgcaatgattttgatggaaccaaccctgatctaaccagcacactaaataaagtatttgagcaata

SEQ ID NO: 259 - DNA, 408 bp, Homo sapiens
  ref <308>: DATABASE ACCESSION NUMBER: S62027
gcaaaaagatgccagtaatcaatattgaggacctgacagaaaaggacaaattgaagatggaagttgaccagctcaagaaagaagtgacactggaaagaatgctagtttccaaatgttgtgaagaagtaagagattacgttgaagaacgatctggcgaggatccactggtaaagggcatcccagaggacaaaaatcccttcaaggagctcaaaggaggctgtgtgatttcataatacaaacaaaaagaaaaaaaattaaacaaattcttggaaatatctcaaatgttaataacaatatgaatttttctcatgcatactattactactaagcatgtacgtgaatttttaaatttatagatgtaaacttttaataaaaattggggtgtggtaaaaaaaaaaaaaaaaaaaa

SEQ ID NO: 260 - DNA, 2867 bp, Homo sapiens
  ref <308>: DATABASE ACCESSION NUMBER: U20180
taccttattgaaacattaaatgacagttcacataagaagttcttcgatgtatctaaacttggcaccaagtatgatgttctgccttactcaatacgggtcttgttggaagctgctgtacgaaattgtgatggctttttaatgaagaaggaagatgttatgaacattttagactggaaaaccaaacaaagcaatgttgaagtgccctttttccctgcccgtgttcttcttcaagattttactggaataccagcaatggtggattttgctgctatgagggaggcagtgaaaactcttggaggtgatcctgagaaagtccatcctgcttgtccgacagatcttacagttgaccattctttacaaattgacttcagtaaatgtgcaatacagaatgcaccaaatcctggaggtggtgacctgcagaaagcaggaaagctctctccacttaaagtgcagcctaagaagcttccctgcagaggccagactacctgccgaggatcttgtgattctggagaactaggccgaaactcaggaacattttcttcgcagattgagaatacacccatcctgtgtccttttcatttgcaaccagtgcctgaacctgaaacagtgttaaaaaatcaagaagtagaattcggcagaaatcgagagaggcttcagttttttaagtggagttcaagagttttaaagaatgtggcagtgatccctcctggaactggaatggctcatcaaataaacttagaatatttgtcaagagtggtttttgaagaaaaagacctcctcttcccagacagtgtagtcggcacagattcacacataacgatggtgaatggtttagggattctggggtggggggttggaggcattgaaacagaagcagttatgcttggtctgccagtttctcttactttaccagaggtggttggatgtgagttaactgggtcatcaaacccttttgttacatccatagatgttgttcttggtattacaaagcacctcaggcaagtaggagtggctggaaagtttgttgagttttttggaagtggagtttcacaattatctatagttgatcgaactacaatagcaaacatgtgtccggaatatggtgctatcctcagctttttccctgttgacaatgtgacattaaaacatttagaacatacaggttttagcaaagccaaactcgaatcaatggaaacataccttaaagctgtgaaattgtttcgaaatgaccagaattcttcaggagaacctgaatactcccaggtgatccagattaatctgaattcaatagttccatctgttagtggtccaaaaagacctcgggatagagttgctgtgacagatatgaaaagcgatttccaggcttgcttaaatgaaaaggttggatttaaaggcttccaaattgcagctgaaaaacaaaaggatattgtctccattcattatgaaggaagtgaatataagctgtctcatggatcagtggtcattgctgcagttatcagttgtaccaataattgcaatccatctgtcatgcttgctgcaggtcttttggctaaaaaggctgttgaagctggtctgcgtgttaaaccttatataagaacaagtttatctccaggcagtgggatggttacacattacctcagttcaagtggagtattaccatatctaagtaagcttggatttgaaatcgttggctatggatgttcaacttgtgtgggaaatacagcacccttatcagacgcagttttaaatgcagtaaaacagggtgatttggttacctgtggtaattttatctggaaaaaaaattttgaaggtcgtctttgtgattgtgttcgtgccaattatcttgcctctccacccttagtggtagcttatgccatagcaggcacagtgaatatagatttccagacagaacctttaggtactgaccccaccggcaagaacatttacctgcatgatatttggcctagtcgagaagaagttcatcgagtagaggaagaacatgttatactatccatgtttaaagcattaaaagataaaatagaaatggggaataaacggtggaattccttagaagcaccggattcagttttgtttccatgggacttaaagtctacttatatcagatgcccttcattttttgataaacttaccaaagagccaattgcactccaggctattgaaaatgcccatgtcttattatatttgggagactctgtcacaacagatcatatatcacctgcaggaagtatcgctaggaatagtgctgccgctaagtatttgacaaacagaggccttacccctcgtgaattcaactcttacggagctcgaagaggtaatgatgctgtaatgacaagaggcacttttgcaaatatcaagctttttaataagtttattggaaaaccagctcctaaaacaattcattttccatcaggacagacgctagatgtatttgaggctgcagagctgtaccagaaagaaggtatcccactgattattttagcaggaaagaaatatggttcaggaaactccagagactgggctgccaaaggaccgtatttactgggtgtgaaagctgttttggccgaaagttatgaaaaaatacacaaagatcatttgattggaattggcatagctccacttcagttccttccaggagaaaatgcagattccttgggcctctccggtagagaaacattttctttaacatttcctgaagaactgtctcctggaattacattgaatatacagacaagcactggaaaagtattcagcgtgattgcttcgtttgaagatgatgtggaaataacattatacaaacatggaggattattaaactttgtggcacgaaaattctcatagtatctact

SEQ ID NO: 261 - DNA, 2844 bp, Homo sapiens
  ref <308>: DATABASE ACCESSION NUMBER: U56387
agcgtcgggaccatggattgggagagccgctgctgctgcccaggacgtttggacctgctgtgcgtgctggcgctgctcgggggctgcctgctccccgtgtgtcggacgcgcgtctacaccaaccactgggcagtcaaaatcgccgggggcttcccggaggccaaccgtatcgccagcaagtacggattcatcaacataggacagataggggccctgaaggactactaccacttctaccatagcaggacgattaaaaggtcagttatctcgagcagagggacccacagtttcatttcaatggaaccaaaggtggaatggatccaacagcaagtggtaaaaaagcggacaaagagggattatgactccagtcgtgtccagtctacctatttcaatgatcccaagtggcccagcatgtggtatatgcactgcagtgacaatacacatccctgccagtctgacatgaatatcgaaggagcctggaagagaggctacacgggaaagaacattgtggtcactatcctggatgacggaattgagagaacccatccagatctgatgcaaaactacgatgctctggcaagttgcgacgtgaatgggaatgacttggacccaatgcctcgttatgatgcaagcaacgagaacaagcatgggactcgctgtgctggagaagtggcagccgctgcaaacaattcgcactgcacagtcggaattgctttcaacgccaagatcggaggagtgcgaatgctggacggagatgtcacggacatggttgaagcaaaatcagttagcttcaacccccagcacgtgcacatttacagcgccagctggggcccggatgatgatggcaagactgtggacggaccagcccccctcacccggcaagcctttgaaaacggcgttagaatggggcggagaggcctcggctctgtgtttgtttgggcatctggaaatggtggaaggagcaaagaccactgctcctgtgatggctacaccaacagcatctacaccatctccatcagcagcactgcagaaagcggaaagaaaccttggtacctggaagagtgttcatccacgctggccacaacctacagcagcggggagtcctacgataagaaaatcatcactacagatctgaggcagcgttgcacggacaaccacactgggacgtcagcctcagcccccatggctgcaggcatcattgcgctggccctggaagccaatccgtttctgacctggagagacgtacagcatgttattgtcaggacttcccgtgcgggacatttgaacgctaatgactggaaaaccaatgctgctggttttaaggtgagccatctttatggatttggactgatggacgcagaagccatggtgatggaggcagagaagtggaccaccgttccccggcagcacgtgtgtgtggagagcacagaccgacaaatcaagacaatccgccctaacagtgcagtgcgctccatctacaaagcttcaggctgctcggataaccccaaccgccatgtcaactacctggagcacgtcgttgtgcgcatcaccatcacccaccccaggagaggagacctggccatctacctgacctcgccctctggaactaggtctcagcttttggccaacaggctatttgatcactccatggaaggattcaaaaactgggagttcatgaccattcattgctggggagaaagagctgctggtgactgggtccttgaagtttatgatactccctctcagctaaggaactttaagactccaggtaaattgaaagaatggtctttggtcctctacggcacctccgtgcggccatattcaccaaccaatgaatttccgaaagtggaacggttccgctatagccgagttgaagaccccacagacgactatggcacagaggattatgcaggtccctgcgaccctgagtgcagtgaggttggctgtgacgggccaggaccagaccactgcaatgactgtttgcactactactacaagctgaaaaacaataccaggatctgtgtctccagctgcccccctggccactaccacgccgacaagaagcgctgcaggaagtgtgcccccaactgtgagtcctgctttgggagccatggtgaccaatgcatgtcctgcaaatatggatactttctgaatgaagaaaccaacagctgtgttactcactgccctgatgggtcatatcaggataccaagaaaaatctttgccggaaatgcagtgaaaactgcaagacatgtactgaattccataactgtacagaatgtagggatgggttaagcctgcagggatcccggtgctctgtctcctgtgaagatggacggtatttcaacggccaggactgccagccctgccaccgcttctgcgccacttgtgctggggcaggagctgatgggtgcattaactgcacagagggctacttcatggaggatgggagatgcgtgcagagctgtagtatcagctattactttgaccactcttcagagaatggatacaaatcctgcaaaaaatgtgatatcagttgtttgacgtgcaatggcccaggattcaagaactgtacaagctgccctagtgggtatctcttagacttaggaatgtgtcaaatgggagccatttgcaaggatgcaacggaagagtcctgggcggaaggaggcttctgtatgcttgtgaaaaagaacaatctgtgccaacggaaggttcttcaacaactttgctgcaaaacatgtacatttcaaggctgagcagccatcttagatttctttgttcctgtagacttatagattattccatattattaaaaagaaaaaaaaaagccaaaaaaaaaaaaaaaa

SEQ ID NO: 262 - DNA, 3492 bp, Homo sapiens
  ref <308>: DATABASE ACCESSION NUMBER: U74612
ggttggaggagcccggagcccgccttcggagctacggcctaacggcggcggcgactgcagtctggagggtccacacttgtgattctcaatggagagtgaaaacgcagattcataatgaaaactagcccccgtcggccactgattctcaaaagacggaggctgccccttcctgttcaaaatgccccaagtgaaacatcagaggaggaacctaagagatcccctgcccaacaggagtctaatcaagcagaggcctccaaggaagtggcagagtccaactcttgcaagtttccagctgggatcaagattattaaccaccccaccatgcccaacacgcaagtagtggccatccccaacaatgctaatattcacagcatcatcacagcactgactgccaagggaaaagagagtggcagtagtgggcccaacaaattcatcctcatcagctgtgggggagccccaactcagcctccaggactccggcctcaaacccaaaccagctatgatgccaaaaggacagaagtgaccctggagaccttgggaccaaaacctgcagctagggatgtgaatcttcctagaccacctggagccctttgcgagcagaaacgggagacctgtgcagatggtgaggcagcaggctgcactatcaacaatagcctatccaacatccagtggcttcgaaagatgagttctgatggactgggctcccgcagcatcaagcaagagatggaggaaaaggagaattgtcacctggagcagcgacaggttaaggttgaggagccttcgagaccatcagcgtcctggcagaactctgtgtctgagcggccaccctactcttacatggccatgatacaattcgccatcaacagcactgagaggaagcgcatgactttgaaagacatctatacgtggattgaggaccactttccctactttaagcacattgccaagccaggctggaagaactccatccgccacaacctttccctgcacgacatgtttgtccgggagacgtctgccaatggcaaggtctccttctggaccattcaccccagtgccaaccgctacttgacattggaccaggtgtttaagccactggacccagggtctccacaattgcccgagcacttggaatcacagcagaaacgaccgaatccagagctccgccggaacatgaccatcaaaaccgaactccccctgggcgcacggcggaagatgaagccactgctaccacgggtcagctcatacctggtacctatccagttcccggtgaaccagtcactggtgttgcagccctcggtgaaggtgccattgcccctggcggcttccctcatgagctcagagcttgcccgccatagcaagcgagtccgcattgcccccaaggtttttggggaacaggtggtgtttggttacatgagtaagttctttagtggcgatctgcgagattttggtacacccatcaccagcttgtttaattttatctttctttgtttatcagtgctgctagctgaggaggggatagctcctctttcttctgcaggaccagggaaagaggagaaactcctgtttggagaagggttttctcctttgcttccagttcagactatcaaggaggaagaaatccagcctggggaggaaatgccacacttagcgagacccatcaaagtggagagccctcccttggaagagtggccctccccggccccatctttcaaagaggaatcatctcactcctgggaggattcgtcccaatctcccaccccaagacccaagaagtcctacagtgggcttaggtccccaacccggtgtgtctcggaaatgcttgtgattcaacacagggagaggagggagaggagccggtctcggaggaaacagcatctactgcctccctgtgtggatgagccggagctgctcttctcagaggggcccagtacttcccgctgggccgcagagctcccgttcccagcagactcctctgaccctgcctcccagctcagctactcccaggaagtgggaggaccttttaagacacccattaaggaaacgctgcccatctcctccaccccgagcaaatctgtcctccccagaacccctgaatcctggaggctcacgcccccagccaaagtagggggactggatttcagcccagtacaaacctcccagggtgcctctgaccccttgcctgaccccctggggctgatggatctcagcaccactcccttgcaaagtgctcccccccttgaatcaccgcaaaggctcctcagttcagaacccttagacctcatctccgtcccctttggcaactcttctccctcagatatagacgtccccaagccaggctccccggagccacaggtttctggccttgcagccaatcgttctctgacagaaggcctggtcctggacacaatgaatgacagcctcagcaagatcctgctggacatcagctttcctggcctggacgaggacccactgggccctgacaacatcaactggtcccagtttattcctgagctacagtagagccctgcccttgcccctgtgctcaagctgtccaccatcccgggcactccaaggctcagtgcaccccaagcctctgagtgaggacagcaggcagggactgttctgctcctcatagctccctgctgcctgattatgcaaaagtagcagtcacaccctagccactgctgggaccttgtgttccccaagagtatctgattcctctgctgtccctgccaggagctgaagggtgggaacaacaaaggcaatggtgaaaagagattaggaaccccccagcctgtttccattctctgcccagcagtctcttaccttccctgatctttgcagggtggtccgtgtaaatagtataaattctccaaattatcctctaattataaatgtaagcttatttccttagatcattatccagagactgccagaaggtgggtaggatgacctggggtttcaattgacttctgttccttgcttttagttttgatagaagggaagacctgcagtgcacggtttcttccaggctgaggtacctggatcttgggttcttcactgcagggacccagacaagtggatctgcttgccagagtcctttttgcccctccctgccacctccccgtgtttccaagtcagctttcctgcaagaagaaatcctggttaaaaaagtcttttgtattgggtcaggagttgaatttggggtgggaggatggatgcaactgaagcagagtgtgggtgcccagatgtgcgctattagatgtttctctgataatgtccccaatcataccagggagactggcattgacgagaactcaggtggaggcttgagaaggccgaaagggcccctgacctgcctggcttccttagcttgcccctcagctttgcaaagagccaccctaggccccagctgaccgcatgggtgtgagccagcttgagaacactaactactcaataaaagcgaaggtggacaaaaaaaaaaaaaaaaaa

SEQ ID NO: 263 - DNA, 947 bp, Homo sapiens
  ref <308>: DATABASE ACCESSION NUMBER: U81002
gccggtggcacgacagttgctgcagggaatcttttaaacgagagcgagaaggactgcgggcaggaccggcgggctcctggggttcagccgtgccgcctcgttacgatgaccagtgtggttaagacagtgtatagcctgcagcccccctctgcgctgagcggcggccagccggcagacacacaaactcgggccacttctaagagtctcttacctgttaggtccaaagaagtcgatgtttccaaacagcttcattcaggaggtccagagaatgatgttacaaaaatcaccaaactgagacgagagaatgggcaaatgaaagctactgacactgccaccagaaggaatgtcagaaaaggctacaaaccactgagtaagcaaaaatcagaggaagagctcaaggacaagaaccagctgttagaagccgtcaacaagcagttgcaccagaagttgactgaaactcagggagagctgaaggacctgacccagaaggtagagctgctggagaagtttcgggacaactgtttggcaattttggagagcaagggccttgatccagctttaggcagtgagaccctgtcatcacgacaagaatccactactgatcacatggactctatgttgctgttagaaactttgcaagaggagctgaagctttttaacgaaacagccaaaaagcagatggaggagttacaggccttaaaggtaaagctggagatgaaagaggaaagagtccgattcctagaacagcaaaccttatgtaacaatcaagtaaatgatttaacaacagcccttaaggaaatggagcagctattagaaatgtaagaagaagcaagtggccagatggctccctcttgggcataaaatctcagaggaggctacttaggacatcatcttggccatgatcttctgggactcaccatctccagaatgaaaacaatttctacagt

SEQ ID NO: 264 - DNA, 2203 bp, Homo sapiens
  ref <308>: DATABASE ACCESSION NUMBER: U96131
cggcggccgcgccctggttgggtccccactgctctcgggggcgccatggacgaggccgtgggcgacctgaagcaggcgcttccctgtgtggccgagtcgccaacggtccacgtggaggtgcatcagcgcggcagcagcactgcaaagaaagaagacataaacctgagtgttagaaagctactcaacagacataatattgtgtttggtgattacacatggactgagtttgatgaaccttttttgaccagaaatgtgcagtctgtgtctattattgacacagaattaaaggttaaagactcacagcccatcgatttgagtgcatgcactgttgcacttcacattttccagctgaatgaagatggccccagcagtgaaaatctggaggaagagacagaaaacataattgcagcaaatcactgggttctacctgcagctgaattccatgggctttgggacagcttggtatacgatgtggaagtcaaatcccatctcctcgattatgtgatgacaactttactgttttcagacaagaacgtcaacagcaacctcatcacctggaaccgggtggtgctgctccacggtcctcctggcactggaaaaacatccctgtgtaaagcgttagcccagaaattgacaattagactttcaagcaggtaccgatatggccaattaattgaaataaacagccacagcctcttttctaagtggttttcggaaagtggcaagctggtaaccaagatgtttcagaagattcaggatttgattgatgataaagacgccctggtgttcgtgctgattgatgaggtggagagtctcacagccgcccgaaatgcctgcagggcgggcaccgagccatcagatgccatccgcgtggtcaatgctgtcttgacccaaattgatcagattaaaaggcattccaatgttgtgattctgaccacttctaacatcaccgagaagatcgacgtggccttcgtggacagggctgacatcaagcagtacattgggccaccctctgcagcagccatcttcaaaatctacctctcttgtttggaagaactgatgaagtgtcagatcatataccctcgccagcagctgctgaccctccgagagctagagatgattggcttcattgaaaacaacgtgtcaaaattgagccttcttttgaatgacatttcaaggaagagcgagggcctcagcggccgggtcctgagaaaactcccctttctggctcatgcgctgtatgtccaggcccccaccgtcaccatagaggggttcctccaggccctgtctctggcagtggacaagcagtttgaagagagaaagaagcttgcagcttacatctgatcctgggcttccccatctggtgcttttcccatggagaacacacaaccagtaagtgaggttgccccacacagccgtctcccagggaatcccttctgcaaaccaaacgttacttagactgcaagctagaaagccaccaaggccaggctttgttaaaagaagtgtattctatttatgttgttttaaaatgcatactgagagacaaacatcttgtcattttcactgtttgtaaaagataattcagattgtttgtctccttgtgaagaaccatcgaaacctgtttgttcccagcccacccccagtggatgggatgcataatgccagcaagttttgtttaacagcaaaaaaggaagattaatgcaggtgttatagaagccagaagagaaactgtgtcaccctaaagaagcatataatcatagcattaaaaatgcacacattactccaggtggaaggtggcaattgctttctgatatcagctcgtttgatttagtgcaaaaatgttttcaagactatttaatggatgtaaaaaagcctatttctacattataccaactgagaaaaaaatggtcggtaaagtgttctttcataataaataatcaagacatggtcccatttgcaggaaaagtgcagactctgagtgttccagggaaacacatgctggacatcccttgtaacccggtatgggcgcccctgcattgctgggatgtttctgcccacggttttgtttgtgcaataacgttatcacatttctaatgaggattcacattaatataatataaaataaataggtcagttactggtctctttctgccgaatgttatgttttgcttttatctcacagtaaaataaatataattaaaaa

SEQ ID NO: 265 - DNA, 1153 bp, Homo sapiens
  ref <308>: DATABASE ACCESSION NUMBER: V00522
ctcctctggcccctggtcctgtcctcttctccagcatggtgtgtctgaagctccctggaggctccagcttggcagcgttgacagtgacactgatggtgctgagctcccgactggctttcgctggggacacccgaccacgtttcttggagctgcttaagtctgagtgtcatttcttcaatgggacggagcgggtgcggttcctggagagacacttccataaccaggaggagtacgcgcgcttcgacagcgacgtgggggagtaccgggcggtgagggagctggggcggcctgatgccgagtactggaacagccagaaggacctcctggagcagaagcggggccaggtggacaattactgcagacacaactacggggttgtggagagcttcacagtgcagcggcgagtccatcctcaggtgactgtgtatcctgcaaagacccagcccctgcagcaccacaacctcctggtctgctctgtgagtggtttctatccaggcagcattgaagtcaggtggttccggaacggccaggaagagaaggctggggtggtgtccacgggcctgatccagaatggagactggaccttccagaccctggtgatgctagaaacatttcctcggagtggagaggtttacacctgccaagtggagcacccaagcgtaacgagccctctcacagtggaatggagtgcacggtctgaatctgcacagagcaagatgctgagtggagtcgggggctttgtgctgggcctgctcttccttggggccgggctgttcatctacttcaggaatcagaaaggacactctggacttcagccaacaggattcctgagctgaagtgcagatgacaatttaaggaagaatcttcttccccagctttgcaggatgaaaagctttcccgcctggctgttattcttccacgagagagggctttctcaggacctagttgctactggttcagcaactgcagaaaatgtcctcccttgtggcttcctcagttcctgcccttggcctgaagtcccagcattgatggcagcgcctcatcttcaacttttgtgctcccctttgcctaaaccctatggcctcctgtgcatctgtactcaccctgtaccacaaacacattacattattaaatgtttctcaaagatggagtt

SEQ ID NO: 266 - DNA, 3273 bp, Homo sapiens
  ref <308>: DATABASE ACCESSION NUMBER: X74794
gaattcggcacgagcgagtcgcgacgtcgtcggcaagcggccgccttccacgtaacgcgcgccggcgggggagggcgttggcgcggagccgacgggaacgtccgcgctgcggagcagggcagggaagccgggaggcgggcccggcccgagcttgtccttgtcgcgcaggtactccgagcactatgtcgtccccggcgtcgaccccgagccgccgcggcagccggcgtggaagggccacccccgcccagacgcctcggagtgaggatgccaggtcatctccctctcagagacgtagaggcgaggattccacctccacgggggagttgcagccgatgccaacctcgcctggagtggacctgcagagcactgctgcgcaggacgtgctgttttccagccctccccaaatgcattcttcagctatccctcttgactttgatgttagttcaccactgacatacggcactcccagctctcgggtagagggaaccccaagaagtggtgttaggggcacacctgtgagacagaggcctgacctgggctctgcacagaagggcctgcaagtggatctgcagtctgacggggcagcagcagaagatatagtggcaagtgagcagtctctaggccaaaaacttgtgatctggggaacagatgtaaatgtggcagcatgcaaagaaaactttcagagatttcttcagcgttttattgaccctctggctaaagaagaagaaaatgttggcatagatattactgaacctctatacatgcaacgacttggggagattaatgttattggtgagcaatttttaaatgtgaactgtgaacacatcaaatcatttgacaaaaatttgtacagacaactcatctcttacccacaggaagttattccaacttttgacatggctgtcaatgaaatcttctttgaccgttaccctgactcaatcttagaacatcagattcaagtaagaccattcaacgcattgaagactaagaatatgagaaacctgaatccagaagacattgaccagctcatcaccatcagcggcatggtgatcaggacatcccagctgattcccgagatgcaggaggccttcttccagtgccaagtgtgtgcccacacgacccgggtggagatggaccgcggccgcattgcagagcccagtgtgtgcgggcgctgccacaccacccacagcatggcactcatccacaaccgctccctcttctctgacaagcagatgatcaagcttcaggagtctccggaagacatgcctgcagggcagacaccacacacagttatcctgtttgctcacaatgatctcgttgacaaggtccagcctggggacagagtgaatgttacaggcatctatcgagctgtgcctattcgagtcaatccaagagtgagtaatgtgaagtctgtctacaaaacccacattgatgtcattcattatcggaaaacggatgcaaaacgtctgcatggccttgatgaagaagcagaacagaaacttttttcagagaaacgtgtggaattgcttaaggaactttccaggaaaccagacatttatgagaggcttgcttcagccttggctccaagcatttatgaacatgaagatataaagaagggaattttgcttcagctctttggcgggacaaggaaggattttagtcacactggaaggggcaaatttcgggctgagatcaacatcttgctgtgtggcgaccctggtaccagcaagtcccagctgctgcagtacgtgtacaacctcgtccccaggggccagtacacgtctgggaagggctccagtgcagttggcctcactgcgtacgtaatgaaagaccctgagacaaggcagctggtcctgcagacaggtgctcttgtcctgagtgacaacggcatctgctgtatcgatgagttcgacaagatgaatgaaagtacaagatcggtattgcatgaagtcatggaacagcagactctgtccattgcaaaggctgggatcatctgtcagctcaatgcgcgcacctctgtcctggcagcagcaaatcccattgagtctcagtggaatcctaaaaaaacaaccattgaaaacatccagctgcctcatactttattatcaaggtttgatttgatcttcctcatgctggaccctcaggacgaagcctatgacaggcgtctggctcaccacctggtcgcactgtactaccagagcgaggagcaggcagaggaggagctcctggacatggcggtgctaaaggactacattgcctacgcgcacagcaccatcatgccgcggctaagtgaggaagccagccaggctctcatcgaggcttatgtagacatgaggaagattggcagtagccggggaatggtttctgcataccctcgacagctagagtcattaatccgcttagcagaagcccatgctaaagtaagattgtctaacaaagttgaagccattgatgtggaagaggccaaacgcctccatcgggaagctctgaagcagtctgcaactgatccccggactggcatcgtggacatatctattcttactacggggatgagtgccacctctcgtaaacggaaagaagaattagctgaagcattgaaaaagcttattttatctaagggcaaaacaccagctctaaaataccagcaactttttgaagatattcggggacaatctgacatagcaattactaaagatatgtttgaagaagcactgcgtgccctggcagatgatgatttcctgacagtgactgggaagaccgtgcgcttgctctgaagccttgtgagcaaggaaggctccctgcatgtcatgcaattctgcacgccacatgggtgtggtcatgcaatcatcagttggccgccatcagtgtaaatagagcttaaagtcatggtttggctgcataaaaaattttctaacttgggttcaatatttgtagtgaagtatctgttttcatttttttcacgttataaataaaaatactatgctggccgggcgcggtggctcacacctgtaatcccagcactttgggaggccaatgtgggtggatcatgaggtcaggagttcaagaccagcctagccaagatggtgaaaccccgtctctagtaaagataacaaaaaattagctgggcttgatggcatgcgcctgtaatcccagctactcgggaggttgaggcaggagatcgcttaaacccaggcggcagaggttgcagtgagccaagatcgcgccactgcactccagcctcagcaatagagtgagactgtctcaaaaaaaaaa

SEQ ID NO: 267 - DNA, 4200 bp, Homo sapiens
  ref <308>: DATABASE ACCESSION NUMBER: Z26649
cgcccgggacagactggcgggccggcgggcactgacgccgcggggccggagcgggccgcgcggtgggagcagcggcgccgtcggtccccgtcagggctccgtgggtccccgacccgcccctggccgggccatggcgggcgcccagcccggcgtccacgcgctgcagttggagccgcccaccgtggtggagaccctgcggcgcgggagtaagttcatcaaatgggacgaggagacctccagtcggaacctggtgaccctgcgtgtggaccccaatggcttcttcttgtactggacgggccccaacatggaggtggacacactggacatcagttccatcagggacacacggacaggccggtacgcccgcctgcccaaggaccccaagatccgggaagttctgggctttgggggtcccgatgcccggctggaggagaagctgatgacggtggtgtctgggccagacccggtgaacacagtgttcttgaacttcatggccgtgcaggatgacacagccaaggtctggtctgaggagctattcaagctggctatgaacatcctggctcagaacgcctcccggaacaccttcctgcgcaaagcatacacgaagctgaagctgcaggtgaaccaggatggtcggatccccgtcaagaacatcctgaagatgttctcagcagacaagaagcgggtggagactgcgctggaatcctgtggcctcaaattcaaccggagtgagtccatccggcctgatgagttttccttggaaatctttgagcggttcctgaacaagctgtgtctgcggccggacattgacaagatcctgctggagataggcgccaagggcaagccatacctgacgctggagcagctcatggacttcatcaaccagaagcaacgcgacccgagactcaacgaagtgctgtacccgcccctgcggccctcccaggcccggctgctcatcgaaaagtatgagcccaaccagcagtttctggagcgagaccagatgtccatggagggctttagccgctacctgggaggcgaggagaatggcatcctgcccctggaagccctggatctgagcacggacatgacccagccactgagtgcctacttcatcaactcctcgcataacacctatctcactgcggggcagctggctgggacctcgtcggtggagatgtaccgccaggcactactatggggctgccgctgcgtggagctggacgtgtggaagggacggccgcctgaggaggaacccttcattacccacggcttcaccatgaccacagaggtgcctctgcgcgacgtgctggaggccattgccgagactgccttcaagacctcgccctaccccgtcatcctctccttcgagaaccatgtggactcggcaaagcaacaggcaaagatggctgagtactgccgctccatctttggagacgcgctactcatcgagcctctggacaagtacccgctggccccaggcgttcccctgcccagcccccaggacctgatgggccgtatcctggtgaagaacaagaagcggcaccgacccagcgcaggtggcccagacagcgccgggcgcaagcggcccctggagcagagcaattctgccctgagcgagagctccgcggccaccgagccctcctccccgcagctggggtctcccagctctgacagctgcccaggcctgagcaatggggaggaggtagggcttgagaagcccagcctggagcctcagaagtctctgggtgacgagggcctgaaccgaggcccctatgttcttggacctgctgaccgtgaggatgaggaggaagatgaggaagaggaggaacagacagaccccaaaaagccaactacagatgagggcacagccagcagcgaggtgaatgccactgaggagatgtccacgcttgtcaactacatcgaacctgtcaagttcaagtcctttgaggctgctcgaaagaggaacaaatgcttcgagatgtcgtcctttgtggagaccaaggccatggagcaactgaccaagagccccatggagtttgtggaatacaacaagcagcagctcagccgcatctaccccaagggcacccgcgtggactcctccaactacatgccccagctcttctggaacgtagggtgccagcttgttgcgctcaacttccagaccctcgatgtggcgatgcagctcaacgcgggcgtttttgagtacaacgggcgcagcgggtacctgctcaagccggagttcatgcggcggccggacaagtccttcgaccccttcactgaggtcatcgtggatggcatcgtggccaatgccttgcgggtcaaggtgatctcagggcagttcctgtccgacaggaaggtgggcatctacgtggaggtggacatgtttggcctccctgttgatacgcggcgcaagtaccgcacccggacctctcaggggaactcgttcaaccccgtgtgggacgaagagcccttcgacttccccaaggtggtgctgcccacgctggcttcacttcgcattgcagcctttgaggaggggggtaaattcgtagggcaccggatcctgcctgtctctgccatccgctccggataccactacgtctgcctgcggaacgaggccaaccaaccgctgtgcctgccggccctgctcatctacaccgaagcctcggactacattcctgacgaccaccaggactatgcggaggccctgatcaaccccattaagcacgtcagcctgatggaccagagggcccggcagctggccgccctcattgaggagagtgaggctcaggctggccaagagacgtgccaggacacccagtctcagcagctggggtctcagccgtcctcaaaccccacccccagcccactggatgcctccccccgccggccccctggccccaccacctcccctgccagcacctccctcagcagcccagggcagcgtgatgatctcatcgccagcatcctctcagaggtggcccccaccccgctggatgagctccgaggtcacaaggctctggtcaagctccggagccggcaagagcgagacctgcgggagctgcgcaagaagcatcagcggaaggcagtcaccctcacccgccgcctgctggatggcctggctcaggcacaggctgagggcaggtgccggctgcggccaggtgccctaggtggggccgctgatgtggaggacacgaaggagggggaggacgaggcaaagcggtatcaggagttccagaacagacaggtgcagagcctgctggagctgcgggaggcccaggtggacgcagaggcccagcggaggctggaacacctgagacaggctctgcagcggctcagggaggtcgtccttgatgcaaacacaactcagttcaagaggctgaaagagatgaacgagagggagaagaaggagctgcagaagatcctggacagaaagcgccataacagcatctcggaggccaagatgagggacaagcataagaaggaggcggaactgacggagattaaccgtcggcacatcactgagtcagtcaactccatccgtcggctggaggaggcccagaagcagcggcatgaccgtcttgtggctgggcagcagcaggtcctgcaacagctggcagaagaggagcccaagctgctggcccagctggcccaggagtgtcaggagcagcgggcgaggctcccccaggagatccgccggagcctgctgggcgagatgccggaggggctgggggacgggcctctggtggcctgtgccagcaacggtcacgcacccgggagcagcgggcacctgtcgggcgctgactcggagagccaggaggagaacacgcagctctgaactggctgagcgaggtggccacagggccagggcgggcgctgggtggagggcaggaggcaatgacactaatgctttttttttttttttttaactttttatctagaaattttatttttttaaacccggggcaagtacctcagctaactcccttcatcctcctggggcccctccttcctgccctcagtcttaggttagggccttggtcagggctttgctccctgtgacacccacaccctcgagctagcagcgtctcctcccttccccgggagagctggctggagacttggagctccgggaagtaggagtcacatttttttctctattctttggggattttttttacatgaataaaagtggatttcagg

SEQ ID NO: 268 - DNA, 360 bp, Homo sapiens
  ref <308>: DATABASE ACCESSION NUMBER: AA598803
gtgagttttcaatttttttcctgtggtctggaataatttaaatagcattagaattatttgtttgttaaaagttagctaggacaaagtgtaaaacaatctaatcctgatgacacttttaatagtagatttttaatcagctttgtgatttctttaatagttattggtttattcaggctttttattaaaaaggtatatacattctctgtgacatacaaagttaaaagttctctattattgctgattgtactggttgttgcttgttgactgtactattcagatggctttatgcttttgtgtattttatgtcacctagatctaattctgaaaacattgtaataaaataattagctataatggtaa

SEQ ID NO: 269 - DNA, 2033 bp, Homo sapiens
  ref <308>: DATABASE ACCESSION NUMBER: NM_003158
gaattccgggactgagctcttgaagacttgggtccttggtcgcaggtggagcgacgggtctcactccattgcccaggccagagtgcgggatatttgataagaaacttcagtgaaggccgggcgcggtgctcatgcccgtaatcccagcattttcggaggccgaggcatcatggaccgatctaaagaaaactgcatttcaggacctgttaaggctacagctccagttggaggtccaaaacgtgttctcgtgactcagcaatttccttgtcagaatccattacctgtaaatagtggccaggctcagcgggtcttgtgtccttcaaattcttcccagcgcgttcctttgcaagcacaaaagcttgtctccagtcacaagccggttcagaatcagaagcagaagcaattgcaggcaaccagtgtacctcatcctgtctccaggccactgaataacacccaaaagagcaagcagcccctgccatcgcacctgaaaataatcctgaggaggaactggcatcaaaacagaaaaatgaagaatcaaaaagaggcagtggctttggaagactttgaaattggtcgccctctgggtaaaggaaagtttggtaatgtttatttggcaagagaaaagcaaagcaagtttattctggctcttaaagtgttatttaaagctcagctggagaaagccggagtggagcatcagctcagaagagaagtagaaatacagtcccaccttcggcatcctaatattcttagactgtatggttatttccatgatgctaccagagtctacctaattctggaatatgcaccacttggaacagtttatagagaacttcagaaactttcaaagtttgatgagcagagaactgctaacttatataacagaattgcaaatgccctgtcttactgtcattcgaagagagttattcatagagacattaagccagagaacttacttcttggatcagctggagagcttaaaattgcagattttgggtggtcagtacatgctccatcttccaggaggaccactctctgtggcaccctggactacctgccccctgaaatgattgaaggtcggatgcatgatgagaaggtggatctctggagccttggagttctttgctatgaatttttagttgggaagcctccttttgaggcaaacacataccaagagacctacaaaagaatatcacgggttgaattcacattccctgactttgtaacagagggagccagggacctcatttcaagactgttgaagcataatcccagccagaggccaatgctcagagaagtacttgaacacccctggatcacagcaaattcatcaaaaccatcaaattgccaaaacaaagaatcagctagcaaacagtcttaggaatcgtgcagggggagaaatccttgagccagggctgccatataacctgacaggaacatgctactgaagtttattttaccattgactgctgccctcaatctagaacgctacacaagaaatattttgtttttactcagcaggtgtgccttaacctccctattcagaaagctccacatcaataaacatgacactctgaagtgaaagtagccacgagaattgtgctacttatactggaacataatctggaggcaaggttcgactgcagtcgaaccttgcctccagattatgaaccagtataagtagcacaattctcgtggctactttcacttcagagtgtcatgtttattgatgtggagctttctgaatagggaggttaaggcacacctgctgagtaaaacaaatatttcttgtgtagcgttcttaggaatctggtgtctgtccggccccggtaggcctgttgggtttctagtcctccttaccatcatctccatatgagagtgtgaaaataggaacacgtgctctacctccatttagggatttgcttgggatacagaagaggccatgtgtctcagagctgttaagggcttatttttttaaaacattggagtcatagcatgtgtgtaaactttaaatatgcaggccttcgtggctcgag

SEQ ID NO: 270 - DNA, 303 bp, Homo sapiens
  ref <308>: DATABASE ACCESSION NUMBER: AW190932
tgtaaaaaaaaaaaaataagaaaaataaaaaattaatttttgtagtgataggatccccctgaggccagagaatagggtttggagacaaaggagcattcccttcagcctttgactggtggcaggccaagtctttatttacatagggtgtaaccaaataggaaacctttaaaggggacttaaaccccagattttttacacagggcacttgcttgagcctcatcccgctttttggaatggcttttgcttcaataaatctgggcttttgttccttccaaaaaaaaaaaaaaaaaaaaaaaaaaaaaa

SEQ ID NO: 271 - DNA, 456 bp, Homo sapiens
  ref <308>: DATABASE ACCESSION NUMBER: BE675111
ggctggcacaaagcccccagctctgtgggtaggatctccccttcactgccctctctctcagaaaggacagcacacccttgggaaagggggaggagagagactgagcacaaatccactgctggaaattactattcagcagagaagctgggtcttgggctgtgaatcactgcaggcctcctgataagctgctgcctccagccctgcacagctgtctgttgagagataacagcctcataagcttctctgcccaactccaagccagctggggggtgggggtgctgctgtgtgctggaagagctctggtgagttgggggtggcatacagccccaggatctcagaagcagatctcatcccatgcaactcagcagcacccctggaaagggggagatgcggaagaatgtatttataagtcattttgctggcagaaccctgaaataaatcctgctggtgacaaga

SEQ ID NO: 272 - DNA, 1346 bp, Homo sapiens
  ref <308>: DATABASE ACCESSION NUMBER: NM_018605
gacctgggcgggcggaggagtgtgacgggccttagggccgctgtggatggtttctaaaatgatcattgaaaacttcgaggcactcaagtcctggctcagcaagactctcgagcccatctgtgatgcagatccatccgccctagcaaaatatgttctggctttggtaaagaaagacaaaagtgaaaaagagttaaaggcattatgtattgatcagctggatgtatttcttcagaaagagacacagatatttgtggaaaaactttttgatgctgtgaatacaaagagttacctacctcctccagagcagccatcatcaggaagcctgaaggtagaattttttccacaccaagaaaaagatataaagaaggaagaggtaacgatttgtgttaataccttacaggttatttaaacacataagaggaataaccaaactgagtttttatcttctatatctttgtgttggagtcctcaggaccactcccagtttaaatgatttttctaggaggactcataggactctgcatataattatgcttatggccctggcttatttcagcaaaaggatataaagcaaagtcagcaaatggaaaaggtgtatgaggccaagtccagtggaaaacaagcacaagcttacaaagtcctcagagttgcacaggatgtgcttaattcccctagcagtgaactgtaacaacacatgggaattaggcaagctccttagaaactctgccctgcgttcttatttggaactggtcacataggcaccgcctacctagtatgtaccaaaattccagactcctgggaggaaggcagatgttcagtgtagaccatattgtttcataactaattcaggcatagtgaaccattccttatcagggggtaatgggaaccctcgagaaatcaaagtgcccaggagccagccttacaagcatgctggctttctaaggttagtattgtcaggcctgcttttactctgcacaatatcttacagatatagagtcttaatatctgttctatgaaaataattaggttgacaattggtctgtttgcttttgtcatacatgtatttagtaggggactgtttttaaggtagtaaaacacaaggaccttcacaagacagtggatatgacttcatacttcaagaggtcccaaaatttttgtgcgtattttacaaccttctctcttcacccttagttactagtcatataataatctatatcttttccatttgatgttaaaagattataatttggccagggtgagcgtggtggctcatgcctgtaatcccagcattctgggaggctgaggcaggaggctcacttgagcccaggagtttgagaccagtctgg

SEQ ID NO: 273 - DNA, 679 bp, Homo sapiens
  Modified_base 1 ... 679: n = a,c,g, or t
  ref <308>: DATABASE ACCESSION NUMBER: NM_018692
cgggtaaggagggaaaaagtaaatgaagttccaggaatgtcattctgaagtaatgaggcatggacagaaaatatacccctcacatcatcggattgagatggcagtcgaaatagcttcattgaagtgccagcactcatccatcaatcaatcacccacaaggaaaaatagcaacagtacaacggggtggcttttatgggatttactcatgggcatagggaatagcggctcaaatgtagttctgacatgaaaagcaaggtgctgatattattttttatgatgggaggatcataaagtgaattgagaacagtgaggtctgtctttgcttaacctattcaaccagaaatgaatggagctcgactggaaaggaacagtcttcagatgggttaagattgaagggtggactggactctactgagcaccgtccttcaacaaggaaattctattaaaggaaaatcaatgcattagtattggggttcttgtagcttgttaaaaattgtctgctccaatccagggttattaggccaaagttacataattcagatctcactgcaaccatccaaaagtggattctcgagcccttgctccaatggggggaggagatcaatacaattccccaatttccatggaaaatttntttcccttcttaaggaangaaaaaataaatcatcctgctttcaac

SEQ ID NO: 274 - DNA, 556 bp, Homo sapiens
  ref <308>: DATABASE ACCESSION NUMBER: Contig1352
aataattgcagggccagcctgccatgatctttctcacttactcctctcccattcagcaatcaaccagactaaggagttttgatccctagtgattacagccctgaagaaaattaaatctgaattaattttacatggccttcgtgatctttctgctgttcttactttttcgaatgtagttggggggtgggagggacaggttatggtatttaaagagaataaacattttgcacatacatgtattgtacaacagtaagatcctctgttaaaaccagctgtcctgttctccatctccatttcttcccatgctgtaaccccaggctccaccagctgttccccagtgatgttacctagcttccctctaccgttgtctactgaccatttccactacatgcctttcctaccttcccttcacaaccaatcaagtgaatacttgattattatctcttccttactgtgctttatcttttttgtttggattggttctaattaatgaaaataaaagtttctaaatttacatttttatagggtattgtaaataaaaacaaattgtatactt

SEQ ID NO: 275 - DNA, 1155 bp, Homo sapiens
  ref <308>: DATABASE ACCESSION NUMBER: Contig1938
ctcctgttgctcctcgggctcttggccggcgggcccgcgccggcaggtgcagcgaagatgaaggtggtggaggagcccaacgcgtttggggtgaacaacccgttcttgcctcaggccagtcgcctccaggccaagagggatccttcacccgtgtctggacccgtgcatctcttccgactctcgggcaagtgcttcagcctggtggagtccacgtacaagtatgagttctgcccgttccacaacgtgacccagcacgagcagaccttccgctggaacgcctacagtgtgatcctcggcatctggcacgagtgggagatcgccaacaacaccttcacgggcatgtggatgagggacggtgacgcctgccgttcccggagccggcagagcaaggtggagctggcgtgtggaaaaagcaaccggctggcccatgtgtccgagccgagcacctgcgtctacgcgctgacgttcgagacccccctcgtctgccacccccacgccttgctagtgtacccaaccctgccagaggcctgcagcggcagtgggaccaggtagagcaggacctggccgatgagctgatcaccccccagggccatgagaagttgctgaggacactttttgaggatgctggctacttaaagaccccagaagaaaatgaacccacccagctggagggaggtcctgacagcttggggtttgagaccctggaaaactgcaggaaggctcataaagaactctcaaaggagatcaaaaggctgaaaggtttgctcacccagcacggcatcccctacacgaggcccacagaaacttccaacttggagcacttgggccacgagacgcccagagccaagtctccagagcagctgcggggtgacccaggactgcgtgggagtttgtgaccttgtggtgggagagcagaggtggacgcggccgagagccctacagagaagctggctggtaggacccgcagggaccagctgaccaggcttgtgctcagagaagcagacaaaacaaagattcaaggttttaattaattcccatactgataaaaataactccatgaattctgtaaaccattgcataaatgctatagtgtaaaaaaatttaaacaagtgttaactttaaacagttcgctacaagtaaatgattataaatact

SEQ ID NO: 276 - DNA, 1752 bp, Homo sapiens
  Modified_base 1 ... 1752: n = a,c,g, or t
  ref <308>: DATABASE ACCESSION NUMBER: Contig2313
aaaattgtagacttttgtgattttgccaaagttgtagctaaatatttatacacttgtcttgaatttttttcagatccacttaaaatatttagaaaaacaagttttattccttatgtgtcttataaggaataaaatggtcttcatttgacacttactttcccatgaacacttgcagttgctaagggactttattttgtaacatatcaattataaatattgtatttatctttgaaattttgtacattgcttttcccaccttttcctttttcttctttcttgtctgtattggtttttgatcacggcctggtgttgtgatactgggaagagcattagccaagaacttgtctctttgatctgtttcgttaagctgaaccagtgtctttacatttcatttgtacttcaaaaatatatgctattgtttagactttccatcctttttttttttttattttgaggaaaagtcaaattcattgtttatttttatattatttttaagttatctgaacaaatacttttgaaaaaaaagtttgttgtatagtcaaaacaaatcggtgccacccggccgtgacaaatcctagtagattctgtgcatgtggacaacactcatcgggggnngnnnnngncnnnnnnnnncngnnngngnncnngctatctaatgtaaaaagtcattttagatgccacccattgactttgccacatagctgaactgtgtttactggaaaaattcagaggcctaaagtttaaaataaaatttacttctgatgttttaattaaaatgtttgccacattaacttttctgatgccttaaaagtgaacttctttaaagaacctttgtgctattttatcacaggcttacactacaattgttaataaatacttcatttggagatgtatggtgtaaaacacacaaacacacacaaaaaagcacaagcccgctgcatgacccgtctctcctttctgggactatttctgctgcgtcctgcaccctcctgggcccacctccgattcacagaggtttcagggggacccaaatcactgctggttttcaatttttttttaacaatacatttttgtggtcagttccaacagcactgtccgtacttttaaaactggaatgacctccttcagatatcgtgcctcttagtgccaaacccacagtgagaccaaaagtgtcaggtgtttttttttttttctttctcctttgcactaagtgctttgcagacacggcacagcaaacattttgcaaactgcagcagaaatcgaatttaaaacaaaaaggaggggctttaaaataccttcttgacaaaaatcaacaatgcacaacttacaaagtgttcattctaggggcaaaattaaataaacagaatgtccccaggagtcagcaggtcacagtttggctttgtgatggttgacaaggtctagctacatgggaaagcctgagaagtcactttggaactaaattgcctccattttattttgtacgagtaagggtttgatctacaaaagagctcacatggacgcactgagaacgcctgccagcttccccatgccctcacttggtttgtgttttaggttaagtagtcaatgcccacatcacttcactgtctcaagactgagcacttcactaaatggtagattttactgttaaagaccctacaataagattgttttatctgtacattttttcagatatttaactgtataaaaatgttcattttacacaatatttaattaaagtatttcttgtctgtg

SEQ ID NO: 277 - DNA, 1514 bp, Homo sapiens
  ref <308>: DATABASE ACCESSION NUMBER: Contig3677
tttaaacataaaagttttaaattggtattaactctgtactctgccctagattgttttagcttctgttctgtaatcatgagtttggttggagatattctccatagatgatcttctactgaaatgcctaaagaagtcacaggctggcttctgttttattcagggatttttttaaaaagtcaatcagaaaagggatactggagcttcttcatgtatgtaacagcatattaaactggagacagtgatgaatcagctacaaaggtaatattgtattaaaatcatgtttaagatagctgcttttatgtgtattttatattgcatgcttttgtaaaaacatgctgggtgatgaaagattagttttagagagaaaatgttcatctgtgcagaggatgcattttcttccattaattctggaaaaaacgttcacagttatatatatggtattttgcaaaaggactattaatagaaccttttgagatgaattaatgtaagaatattttttaaataggcttactgtcaaattgcaactttttttttagatacagatgtggaaaacagtgctaagtcatttggcacctccttacaaatatttttcatggtcacatttattaaatgttactacatttctgaatttttgaaaaatgtattttatcattaaatggcattattttaaagggtgaaaaactgacacagtcaattcagaaaatggactgaagtctgaataaggtcattgcatttaaaaagcatataactgtacttgactgatgagggaggtgttactttcattgtatataggtcttatttcataaacagatatcctgtatcaaataaaagtatttgttatatatttgaagttatgcatggaaaggagtgtgtttaaattgttacaaacaataatgcgtcattaaaggccatgctgatcttgcataactataagtactatgaatgaatttggttggttttggtgttgtacagctcacatgtttacacactcagtgccctaatttcccctgagggaatcgctttttaagtgatccttacagtggtgttttatgttactttattacagagctccttggttttttacttctgcacttaaatttttttaaataacatgatgatggtacattttcctctattgtctagctaagggctttcggtccaccagtaaataagatcaaatgctcttaaatgttcctgttaccatcctaatgtaaatactggatttttctgtcatttagcaccatgctgcttctgtctgtcttaatgctggcattaagatcatgagccctttttctccagtagtacaggctttgaaaactacttctattaagttattgatgcaatttgatattttttcataatctatatttaaacaaaattacatcattgcatcatcttttctaaattcatctccattaaaacttgccttaagctaccagattgcttttgccaccattggccatactgtgtgtttgtttgtttaatttactttcacaataaacttctgtgtagta

SEQ ID NO: 278 - DNA, 376 bp, Homo sapiens
  ref <308>: DATABASE ACCESSION NUMBER: Contig6796
gcatttatgtcgttcctacacagtggatggtgagaaaggcatctggaacccaaggattctctagggcatttttagcacttcccatgtatgccactaacttctaagggacagctataacagtctcaaagaggggaatgattgaggtcctttagggaatgatgttttggtacaccccaccccgtataaatcctgagaagctgagctactggctgagggaagaggaaccatgggatgtgtaaggaaagaaggaaatttattatttcagccttatgactagccagttacagaaacaagttactgcaactgttacatggagggttggcactccatatcagtgagttccagatatcgacttgactaaccacagaaagtactc

SEQ ID NO: 279 - DNA, 397 bp, Homo sapiens
  ref <308>: DATABASE ACCESSION NUMBER: Contig8113
ctgttccaggaagtgtgtgtttgtgcatgcacgtatgtgcacatgcctgtgtgtcttcaggtgctcttgttttttctgataaaggccaacatgcaaagaagaccatcttccccaagagcagacaaggcctagaagagataggttcaaagaataaagggaaactgaacatggcccataccctccaccatgtacaattaagtgagaagatgagagaatgcatgtaacagcctaacacttaaaggcactatgaaattaagagcaaataactgtcagatggtaaatgagagccatttgctaatgcctttagttacctgagatgcagaccaaagagtatacgtggaaatcacgtatctcctcccagcaaaataaaaaacaaaactcaaaaggttcttagcat

SEQ ID NO: 280 - DNA, 382 bp, Homo sapiens
  ref <308>: DATABASE ACCESSION NUMBER: Contig8373
agcagttttcaagtctggggaaataggcacatggacagattatatgaaggtatttcattagctttcttctctttatggcagcttcagattgatgaatttgaggtacaaatgagtgagtgacatatgtatattttcctctgattttatgactgatttacaaattaggagtgcaaatgggctgttccccgatagcatcttctgggaagaatccaaccaagatacaaagcagatgatggtggatcggcaaactcttttctatgaaaagaaaaaccagatataccagggactggaaagcacctgcttgaaaattgatatgagcatgtctgaatttttcccttataagagcctgagtattgtaacaggtctcttgcacagggggttg

SEQ ID NO: 281 - DNA, 345 bp, Homo sapiens
  ref <308>: DATABASE ACCESSION NUMBER: Contig9810
ctgtgccttttaaggcagagggagatccctatggcgttagtcttcccaggccttaaagggcccttgtcttcactcacaaacctcttatctcttcttctccttcctctacattttaaagggggagagggaaaagtaaccgggagacaaattgagccacatattttcagacacttgttaccatattttaaaatctggcttcacatacacagagtctttgctatgcaccatgtactgttctaagcttcttaaaaatagaatctcaattattattttgcaggcaatactctatgcattcattagctaggacaacaatgcatttgcagtagtgagatttcgttaaaaaat

SEQ ID NO: 282 - DNA, 574 bp, Homo sapiens
  ref <308>: DATABASE ACCESSION NUMBER: Contig173
aaaaaaaaagaaaagaacacttctttatttgagggactttcccaacaccaggtgcttggggatttcttagagatcaccaaccgactccctcactgtgaaattaaaccaagtactggaaacgtaactaaacagcgaaccatgtagcttcacctgactcagtgctgggggcctctaccatctactgtgcttgtgtcatgatgctttttctctgaagtggtgtgggaagtaccaggggactggcagaagcccaggccctctctacttttaccagcaactgatcatgtctttcagaatccatgtacatataggctgttctagccacagtggtagatttatgattcacatccgaaagtgtgccttagttatcaatttaacatttctctagtattcatatcccttttcttaccatatacctcagtgtatccttcctgtgtcaagccttataaatcatgtaatttagtgccactcatgtaaatcagtaaaatcacaaaggtctatttaatgaaaacgatttaccaatgttgtttttttttaacaagaaaaaaaataaaagcacattgtcattttttttcct

SEQ ID NO: 283 - DNA, 396 bp, Homo sapiens
  ref <308>: DATABASE ACCESSION NUMBER: Contig32810
atctcctacagatgggtttggggacttacctgttcaaatagcagcccggtgtcctctgtgggtggggggaggtttgtctgtcctttcattctagtaaatccaccatcctctgcacgagagccaggagaatccacatcacttcaaaagagcccccaaatccttactacgtactacagcctcctttcgaatgttcctggttgagagggagatcaattgcattatttacaagtcaaaaaattttgtatcaaacttcctatgagcttgggcactcatggcctatggaggcccacccagacgcagccccgccatcatgctttttcgttgttttgtggatgtacccagggctatttacacactctttcattaaaaggcttatttttatatttaaaatgttct

SEQ ID NO: 284 - DNA, 484 bp, Homo sapiens
  ref <308>: DATABASE ACCESSION NUMBER: Contig34952
gggaaaggtagttttggcacatttcttttctgactacagtgatgtaagtagatagcaaaatactggattttgcacatgctgccctaagaatcactgctgccattgtagtttgctgtattgtctgtattttatatttgattatttgggcttgagtgaaaggtagatttatttccatttgcaggtgttgcacataaaacactccctctttataagaaaaatcataaatgcatataaaatagaaaatatttggagattgcttatctgaaagtcttgctttcttatacacatggttctctcatattaagcctggtagtaactttttagtgtaattacctttagcacttcaaagacgaggaagtaaggaagggaatgcaagactagtgcataaaaatgcaataggtgtcatatgtacagcattcttcttagagttgccttttcatcccaattacagtgagtctgatttccatcctgtatttgcataata

SEQ ID NO: 285 - DNA, 426 bp, Homo sapiens
  ref <308>: DATABASE ACCESSION NUMBER: Contig35752
tctatcatctgggcaaaagatgtgatgagtgtaacttcctgttttctccaaactaaaacactacgcagattcctgtaccgctctgggacagaaatcctcagccagagcagaggccgtccccagagtccacactgtttcctgcataaagtgggttatctcagaagaaacatcccactggtctgtgtgatccctctattgaaatgtggtcttttatctacatctaagtatctctagaagtaatgcgtttgtatgtacttgtcactcagatatgtaatcccttaatttgtgcggggttttggggtgtgaaaaattcttggtttatatcctacacttttaaataacctcgtcaaaacttacatgtatttaacacctttttttgtgagcacatggtaaggttggaagtaaaaatggaaggtttatccctgt

SEQ ID NO: 286 - DNA, 489 bp, Homo sapiens
  ref <308>: DATABASE ACCESSION NUMBER: Contig37540
aataactgtacattgtagaaaaaagtttttgcacttttcccaggggaagctagcaatagttttaaaagcacaaagtgatgtaaaatattttgacttttataataatgcgaagtagttttatttgcattaatcaataatgttcaggatctttttgtagtaagtatattttaaatggtgtaatttgtgtgtttatgatatgtattcaattatttaagttaagtatcagtgtatttttaaaaagtgttcccaggtgaacaaaagtttgcttttcttcaccattctgtacaggacaagcattattcagttcacatagtcagctctcactacacttcaacagaacggggcaagttcgtatttgaattctgttatatttatctaagggaagcaaaattaaccttttaataatagattatctttaatggttattaaaagaatgttattgaccaaaaagacatattttgagattaataaagatgtattagattatcc

SEQ ID NO: 287 - DNA, 621 bp, Homo sapiens
  ref <308>: DATABASE ACCESSION NUMBER: Contig47129
ggagaaaaacaggagtgatgtcatttctttttcatgtattccaattaaagaaacaagggcaggtcgtataatggcatattaatacattagacttaatctagaacccctgtagctttttgatgtgttttatttcttatctctttgaattcctgtttggttacttggcttccaatggaggtgaacttaacaaccatacttgaatattccgtcttgactttgtaaactgtggctacttgaaatgaagtttatctggggttgatggatgaatggtagatttttgcaatgtctcaaggcaataggatgtgtattaaactgtagatattcttagtacagtaaatttatgctgataattttattttgtataatttttacctttttgttaatattttttccttccactttattggtttgcctcctgagctacccctccttaccctcccttctccctcagtgtttcagtaaatttaatttagggtgcctagaaattgcaagtatgtatcctttttgatttgtattttattataatttacacaaacaactgggtttgtgaactgtattactcctggtatctttaaaatattgtgggtgttttaataaattttatatttattttttgcactc

SEQ ID NO: 288 - DNA, 536 bp, Homo sapiens
  ref <308>: DATABASE ACCESSION NUMBER: Contig49875
gttttggctgtcgtgactggagggaagtggtgctcctacatctaatgcgaggaggacagaggtgctgctaaacatcattcccacacaggacagcctcccgcaacaaagaattgcctggtccaaaatgggtgggaaagcctgacttagaggcttagggagttttcccctcctgctaaatgacttgaagcgattgccacatgggttacacataaaatgtgtccatggcatacagttctgactgtaaaatgagcgtcactcaatggtgacaggaaactggaagcactgttaaaatgggaagatatgaaccaatccttatctacatgacacctacacatctagaactttacgaatttctctcatgggctcctggatctggacatttacatgatgccaggcatatagctgtgtggcttcttgcaggcaaaattcccaagtgattgactacatctcttatttttcttccaggtgtttgtgtacagtttaagcaatcacagtctctgcgtagaaagatcttctcaaataaatattgcaaaaag

SEQ ID NO: 289 - DNA, 434 bp, Homo sapiens
  ref <308>: DATABASE ACCESSION NUMBER: Contig50368
gcttcattgtcatcctggtggttgtggtgatcatcctagttggtgtggtcagcctgaggttcaagtgtcggaagagcaaggagtctgaagatccccagaaacctgggagttcagggctgtctgaaagctgctccacagccaatggagagaaagacagcatcacccttatctccatgaagaacatcaacatgaataatggcaaacaaagtctctcagcagagaagatctaaaggacactagcattgccccagatctgggagcaagctaccaacaggggagactctttcctgtatggacagctgctgtggaaatactgcctgcttctcccacctcctcagagccacaggaaagaggaggtgacagagagagagcaaggaaagtgatgaggtggattgatactttctactttgcattaaaattattttctagcctgc

SEQ ID NO: 290 - DNA, 1491 bp, Homo sapiens
  ref <308>: DATABASE ACCESSION NUMBER: Contig56307
cgcgctcagttactggagagctggccgcgcgccgccgcctcccgcacgcttgcacgcgggcccggcttcggggttttgggttcttactccaagcggcggggaggagggggagccccggacacactgtggggaggaggaggaagaagaggaggagggaggaagaaaaaagacgaggaggacaggggcggggggcgggaggcttgcaccttcagcccccccgcgaacgcccaaggtgcacacatcttgaccaactcagcagcaaggtggattttctttgtgtttaaagaaaaaaaatgtccctgtgtctgtagagatgatttgcagttcagcccggctgaagctgaccgaatgagactatgggctgtgcctccgccaagcatgttgccactgttcaaaatgaagaggaagcccagaaagggaaaaactaccagaacggagatgtgtttggcgatgagtataggatcaaaccagtggaagaggtcaaatacatgaaaaatggggcagaagaagagcagaaaatagcagccaggaaccaagaaaacttggaaaaaagtgccagctcaaatgtaagacttaaaactaataaagaggttccgggattagttcatcaacccagagcaaacatgcacatctctgaaagccaacaagaattcttcagaatgctggatgaaaaaattgaaaagggtcgggattactgttcggaagaagaggatatcacatagcaccaattttaccactcaaaccaggagctactactgtgtaaataggttacaccccagttgaaatctttgcaaaggtcggttctattcagcgaacagcactatagcaaaagaagatcgttccatattgtacgccccattaaattacagtgtttcttaatgaacttgcaaaggaatattgctaaaaacaaacaaaaaaaactgttatcgaactttctttgttgctgctagttaaaacttgttgcaacttttcacttctcttgtgtccaggtatgcagcaaaattctgcaatttcaccttaaagatactgttggttttacagatgctctccaacctattttctataagatgaggtagtggtgaactcagataacaaacttcccttctaaactggttctgcttctaagacaagcatctcctgccctctctccttcctccccatctctcgcacgcagtctagagatggactgagccttgcttctcactggcagtgttgagctttggagatgggatggttgctatgccaagccttgtttctctgctcagaagaagtagagaagctattatcaattaaaagcatgctgtgatgtgactcctggaagtgacgtaggagtgagtggcaggttgtttgatttaataggtatcttaatcaagaattaagcttgcaacattggctttgctcagatgcagatggaagtgtgatcccaatcattttgaatccctcttcctcccttttttttttaagaaaataaacattttactgtttttatgg

SEQ ID NO: 291 - DNA, 760 bp, Homo sapiens
  ref <308>: DATABASE ACCESSION NUMBER: Contig62306
ttaaatgaagcaacatagtgagacgtcgtctctacaaaaaaaaaaagaaaaaaaaaattagccaggcatgcgaaacgctgaggtgggaggatcagatgagcttgggaggttgaggctgcagtgagccttggtcatgccactactgtgttctagtctgggcaacagagtgagaccttctctcaaaaaaaaaacccaaaattgtagaattacttctatagctatattttatgataaagaagtgattgtttctcaaaatcgcattttaaagacgttttatggtacttgttggaattgggacttaggagttttgattttgataagaaactgggataattttctgaactttttttcctctgtatcacatttatttactatttttaaaaactttgacatttaacacttgggacaacatttattataaatgataagaaaaatcttagaggtttgtctacccacagtgtcatggaatcttctttgaaaactaatccataaagtccctggagaaattggtcagaatgatctgtcagaaccatttgaaaacttgctcaagagcagttgcttatatatagtaggattttactttttcctgcttatgtactactatatgcttaaaaaacctggaggaatacttaccaaagaggagtaaccatctctgagggtgggattctgggggaatttttgtttttttctgttttctataatgtgaaacttttgtagtatgtatttttctaattgaagagaataaagattaaaacaagta

SEQ ID NO: 292 - DNA, 462 bp, Homo sapiens
  ref <308>: DATABASE ACCESSION NUMBER: Contig10007
tactcctgatacacataatcagtgcacagcagctctctgatacatccggttgatgccttaagtctccctggcttcttacaagtatcttctgggccttgtgtgtccctgggcgcctgtccctggtcaattcccgaaagctactgtgctcctcttgcccatctccccttgcaaataatatcctccatctggggaccggcttcctccaattccaggagaggtggggctgaaggtacagacttgggcatcactggcacagatataagtaaatacagctggagtctgcagagaggctggactaagtcagggagtcaggaaagagaagccacacacaaggacaaccaatcatgtttctcataatcttcttaacctagggaataggacacaatcattttttctttttaaaacatctttatcccctgatcagcctcatttcctcaaaaactataaaggaaaatgctgctg

SEQ ID NO: 293 - DNA, 373 bp, Homo sapiens
  ref <308>: DATABASE ACCESSION NUMBER: Contig13866
tgttgtccagctctaatgatgtcctagagcagaagtgtttcttctgatgtctcattttaacaagaggatgatgtctgtgtatgtctctgtgttttagagaggctggcaaatgctgctaagaggatctgaggttcacataaagaggatgaaaattctgaattactttcattgcaaataaaccttaacaattgtgagagttagagagcatacttttcacataagactttggtatgctgcctaaagctacttacataatttgctattcagagaaatgcatttgtttattgaggacccacccggacttaaattggaaaaatgtaacattcagatttttattttatatgtgaaataaatgtgtgattgctgttcttaa

SEQ ID NO: 294 - DNA, 391 bp, Homo sapiens
  ref <308>: DATABASE ACCESSION NUMBER: Contig15750
attacaaaagagattacacccagtcaattatatatctaaactgaaggtttaggatgttatctataatagttacacatgatataatcctaagcttttgcatacatttttaaatctagaaagactttgaatggaataatacattagttcaataatatgaccaaataacactaacaaatgataggccaataattaaaggtggagaaataatccttttatatatgaaattgattatttttctatatatttttcttatgacctgtgctaaataaaaataaatgatcacttctgaaagtgagacaattatacctctgttaattaattgtaattctaattgtgtttataaagctaactaaatttaaaaatatattttaccaatacctaattaattcag

SEQ ID NO: 295 - DNA, 398 bp, Homo sapiens
  ref <308>: DATABASE ACCESSION NUMBER: Contig16098
acatgtacacacacccagcgattgtgtgtgccgagaaagacccacatacgcacattgttttttcctcttccacgattatctgccagaattctactcagttaattgcggtttgagaacacaccatccacaggagagcaccaatggatctagtctagtgaggttacatttacttgtaatcctcccccttccctttcccatttctttgatgatttttcccataagtgtgtaagctactgggacttagtagaagcaggccgctcctcctaaatgtgatttggaccatatgctttctacattcattcccgcttcggcttttcttctctgcactaactgctaacacgttatagtcaccttgaaatttcctctgctattttccaattaaaagcttaatagccctg

SEQ ID NO: 296 - DNA, 388 bp, Homo sapiens
  ref <308>: DATABASE ACCESSION NUMBER: Contig18296
attaaataaagtttttagttttaatattcaatattcacatataaagcttttgatagttttaaaatggaaagaacctttagttgcttttagtcagagtggaaagattatagtttaaatttgcatagagatttttcatttgcaaagtatccttctatttgtcaacctattcagaccccataacaactctgaggtggttgctattgtgctgaatttacaaatgaagatagatttggctttagagagatcaaattgacctgtccaagaccaattagagttagaaagtggaagaactcttatttgttctgaatatgttttagggaacatatctcataatttcaattactgatgtcactttagtttattaaaaataaaaatatttgaatacttt

SEQ ID NO: 297 - DNA, 339 bp, Homo sapiens
  ref <308>: DATABASE ACCESSION NUMBER: Contig18374
aggggtcccctgaggcccccctaggggctttttgtttgccccagggtgctccatggatctccctgtggcagcaggcatggaaagtcagggctgccttcatggcagtaggctttaagtgggtgactggccccaggccgaaaaaagggtacagcctttaggtggggttcccaaaaacgccttcaggctgggttgagctgctttcccccagggtttttgtgcagctggattttttttgttgcaaacatgcctggcatctgtttccccttgttcctgagtggccccccatggggctttgagcaggctgtttttggattttggcaataaaagtactttggatgc

SEQ ID NO: 298 - DNA, 367 bp, Homo sapiens
  ref <308>: DATABASE ACCESSION NUMBER: Contig18543
tgcccaaagaaagaccagatttcatttggctttgggatcaaagctggggctggagggtggaggtgtcaagccaggccaggcaaagggagatttgaagccagagcaggtgggcgcatctcccaggaaaccctgcatcattctttcctggtgattctttccttctttgttatggttcacatgagtctatggagtgctcattctacattctccgttcttatcttcatcctatgcaactttagaccgctactgttttttaaaagtgatttgatttgggctgtaacctttttttattgttgttagctttgactttgaaatgtgtaataaagattcaagtgagcattagaagttttttttaaaagtagtggtt

SEQ ID NO: 299 - DNA, 360 bp, Homo sapiens
  ref <308>: DATABASE ACCESSION NUMBER: Contig20512
aagaatatttgaaaataaaacaaagctttcagaaatccaactctgcaaaatggccccctaccaagctgcagaaaagcatttcatctttttggaggtttccgcagacatgcagctccagttacaagaaggcagttcccacacggtgcacacaggatggattacctgcactttgaggatgatagccgtggatggtggtttgacatggatatggtgatcatatatatttattcagtgaactgggtcattggattcattgttttctgctttttttgctattttttctttccgttttaggaatttcataccttactacaattgaccaatcataaatgatgtaaataacaattgcttaaacatttt

SEQ ID NO: 300 - DNA, 364 bp, Homo sapiens
  ref <308>: DATABASE ACCESSION NUMBER: Contig21986
cacacaggacaggaagaggccacgcggctccctgcaggaagcgtgccctgcagcaggcgcgaaccacccgagcggcctccacatgcacctagacaggcacgccggctgggtgctcacacctgggcccttgcacctgtgtctgcccagaggggctggtcagcacaccctttacaatgaaggctcacaaagtacacaactccaagtgccagtccatgaaagcagttcgcatagacttttcatgcagttgagtctaatttatattttactatccacttaccctatgtaaccaaatatcatttttacacttattaacaattcatacttttttcttccttaagaggaattaaagcatttcctcaatgag

SEQ ID NO: 301 - DNA, 447 bp, Homo sapiens
  ref <308>: DATABASE ACCESSION NUMBER: Contig22337
aaggataagtgagtgacccttgaccggtgattctctggggacaagtatatacagtctccagtgtctactgtcttttcttatcccacaggtggattgtacacataatgagcatcattgctacccaccatgtttaaacattcttggctcactacatcgtatcattaaacaatttatttcttgagaaattgcacaaaagctgtataatacctttgatcactccattttctcttaaaaagtttttggtgtgttaccattaaaaatgtcttttttcatatataacattttaattgccaaagttgtaatcccatcttttataaaatgtacagttaaacctaaaagtgtacttacagaattcttccacgtatcgagaagtttcatcatcatcatctaattattttcttttaaaaacctgccctcaggacaaataaaaacactattttatctgtc

SEQ ID NO: 302 - DNA, 375 bp, Homo sapiens
  ref <308>: DATABASE ACCESSION NUMBER: Contig23475
ctttgtctggctggctgtgatgggtcctgacaccccatctgtctgtctgtcggtccacctaggtgtttccccccgggccggcctgccgtgacgatcacagccctgccgtctcaggtcacggttttggattctgcgctaacgaggtctcccaggtgggctggaaacactgatgaagacggatagaaaaaacaccagcccaccggattattaataaagataatcacacacaccccttcgtcggcagccggcctgacactttataaagcacgttaggatataatccaattgaaactgcaatatcgagaacatctcatcttatcacaaattgaaattatatcacattcctcttttcttaaattaaaaagctaaaacctt

SEQ ID NO: 303 - DNA, 386 bp, Homo sapiens
  ref <308>: DATABASE ACCESSION NUMBER: Contig24565
cacttctcacctggcattgtgaaaatccgtttacctgcctttcgcgcctcatctaagaggtcctgaaagctgggatcatgtcttatttgtaataatgctgtgttcagttaggtcaaggggctgcatgaactataaccagtgttggtaaatcattgctcttcagcccagtccattcattcatttagtacatattcttccggcacttaacactaagggtataaacatgattgagtaaagtggctgtttcgaggaactctcagtctgtaggacagaggtgcaatagattatgttcaaaacctttttgacagcgtcgaatgagacaaacatgatctctgctaacatcgtgagttcttagttgcaagcaacagaaactggctgatttaagc

SEQ ID NO: 304 - DNA, 484 bp, Homo sapiens
  ref <308>: DATABASE ACCESSION NUMBER: Contig25938
gtcctcgttagtcattgctattcaatcattccagtcccaagttatttttgtgccacttggaatatgagtatttctattggtaactacaaactctatcctgtgtttgtaagaggagctgtgtaagattttttttttttaaagggacaatttacttcattatttatctttcttttgttatagcgttgtaattcttctcagtttttctttgcacatttcaatatgcatggtttaaaaaccattaacttctctaccttttgtacagtaaggtttcattttcacactgtatagtttcattttattgttttgctttgtcagttatatacagtataaagttgctatgcacagagctttttgtaaagacagcttttttgtttactgtttttaatggtcttacttaaagaatatcttgtttgtaaaatgaatatgtctacttcagttttaaactttaaattatcctaacaaaaaaataaaatttttgtactgt

SEQ ID NO: 305 - DNA, 421 bp, Homo sapiens
  ref <308>: DATABASE ACCESSION NUMBER: Contig26022
tttcattgttttctaaagatggcctggaagtagtctttgccactgcttcctccacaaacagctcttcataacatgggctgcatgaaatcaaagcaaactttcccatttcctaccatatatgaaggtgagaagcagcatgagagtgaagaaccctttatgccagaagagagatgtctacctaggatggcttctccagttaatgtcaaagaggaagtgaaggaacctccagggaccaatactgtgatcttggaatatgcacaccgcctgtctcaggatatcttgtgtgatgccttgcagcaatgggcatgcaataacatcaagtaccatgacattccatacattgagagtgaggggccttgaggctgtaggatgacaacactttgactgtggaggtgctagtttgaataaatgtgacaaaagc

SEQ ID NO: 306 - DNA, 444 bp, Homo sapiens
  ref <308>: DATABASE ACCESSION NUMBER: Contig26059
cctctctctttgggaaaggaggtgatcccgaggcgaaggcgcagatcgataacctgcatattggggtgcgcgtcagggtggacaccgcagcaggcgcctttcctccctccccacgtcctgagtcagctctgcgccgctggagcgaaggccgtccccgctggcccactttggggtaaaacgggttcctggcatctcgcgggcgcggtcgttcgccccgcatctggtcaggacttcgccccccggtagatggcttgggtggcttgtacagccctgggaggcgatgccctgtctgaagtcctctgcatacttagttggctgtcaggacagtgcctcccaggtatgcggcaaagagatctccaaccgcttggtcatttccagccactgcgtctccttcacgccaaagggccaaaaacttgagcgtgaaagttgagtagaattagtatt

SEQ ID NO: 307 - DNA, 377 bp, Homo sapiens
  ref <308>: DATABASE ACCESSION NUMBER: Contig26492
cctgtagagttcagccccagtattacaaagcaggatgaagaaattgggattggagctgaaagacaataaattaataactgatacagatggaaagtacatttttcaacccaaggatagaaagaagccccaaacatcatcacacaaaaggaagacagattggctgagagaggcatttacattaaaaaaataaaatactgaaggtttacagggacacatctcttggagtagagcagcctacctccaaggtattggataagcaagacaaggtgttataaagcctattgtgtaaatatatacagaagactgagaggttttcaaccgaataaatgaatgcctggtacagcgttaatatagctgagaaattcatcctgtaacaa

SEQ ID NO: 308 - DNA, 529 bp, Homo sapiens
  ref <308>: DATABASE ACCESSION NUMBER: Contig27623
agacatttacaatatgcgggcaccacactgaatcaggactgtgtgcagagaagcaaaccaggcctttccacatagataggaaaaaataatcataacagttcatggttatgcagcttccagtggactccattgttacctggtaatcatcagtcaattgccatcacccttaaccttaaaggtgtcactttcgtacttcaggtattctttccaaagtccctctaccccttcttctccctgtcttatctgtccctgatctctgccaccctcagttgcttacattggccaaccagcctgaaatgggagaggttgaatccttcatgctatgtgcatagccaacattccacaagatttatgtcactaaagcctgtgaaaatgacaaatggtgagaaagagggccaaaaagggaagcaaaaataaatccaactacgatttaacaaagggcggcccagtatctgtacctagtgggtactgtgatatcttgagggacatgaatttaacaagagaaataaactgctgtatgaggatcttt

SEQ ID NO: 309 - DNA, 474 bp, Homo sapiens
  ref <308>: DATABASE ACCESSION NUMBER: Contig28286
actgaagtccaatttctgggagctcagccagggaatgtgtatttttaaacaagccccctaggttactctgataagtgcaaagtcagagagcgctgctctcatgcactgagcctgagcactcttctattaataaaaaaggagaggagaatcctgggttgggtgcccttcgccttctggcggcagaagagcagagccaggctctaagcacctgcacccaccgctgggctcaggagctgcgctggagaatagaagggctaatttagtcattcatgcctttttagagcaaattacatgtggagagggtggggcacactgaattttattttagccaaatgccccttatctccttatgcaattgatatttttatattgaacattagaggattggtcatttgtcatcaagtcgtctgtaatacagaaaacgataaatacaacctaacagttcaaacatgacgagttaaataaatgatggtt

SEQ ID NO: 310 - DNA, 450 bp, Homo sapiens
  ref <308>: DATABASE ACCESSION NUMBER: Contig28947
ctcatccaaggagctggggcagacttcattgattctagagagacctgtttcagtgcctactcatccctgccctctggtgccagcctccttaccatcacggcttcactgaggtgtaggtgggtttttcttaaacaggagacagtctctcccctcttacctcaacttcttggggtgggaatcagtgatactggagatggctagttgctgtgttacgggtttgagttacatttggctataaaacaatcttgttgggaaaaatgtgggggagaggacttcttcctacacgcgcattgagacagattccaactggttaatgatattgtttgtaagaaagagattctgttggttgactgcctaaagagaaaggtgggatggccttcagattataccagcttagctagcattactaaccaactgatggaagctctgaaaataaaagatcttgaaccc

SEQ ID NO: 311 - DNA, 451 bp, Homo sapiens
  ref <308>: DATABASE ACCESSION NUMBER: Contig29543
aacaccttttctttcccaaacaccaagagcaggttctttctgttacatccattgaggtcacattcttgaagtgcattttgaggaagtcattattttcgctacagcagggactgatgtatcagtctattagaattcagaaaaaagtaagcaaacaaaaaacgtgttggaattattctcttctagcattttgaaatgtacaatggttaatgttaactatagccaccatgatgtattgaagaccaggtcttattctttttatctaactgtacatttgtacccattaacctaatgctcatagcatcaagaaaagatcaatatttaaggtgacaaatatcccaattatgctgatttgattatatgaatgtgttgaattatcatatgtactcccaaaatatgcacatctaagatgtatcaataaaaataaagacaaaaattaaagcttttacagtag

SEQ ID NO: 312 - DNA, 408 bp, Homo sapiens
  ref <308>: DATABASE ACCESSION NUMBER: Contig30993
cctctcataactggtcaacgactgtaacaggttacatcaggtgtttttctacatactttttacacagattctatgcgattaatgtaatttaattcaatgcatcattttattgtactagttcttaggcttgtccttatttttttctaagtgattgtggtttttctcgtggtttttattgtaaaaaatgaaaggctgttgatgcttattctctgtaactaagaatttttaccttttgggggaaaaaagcattgctatgaactaatgaattgaaacttcatttactcattgtaaatacactattgtgcaaaaaaagttttcactcaattgaattgctagtgttaactgaattttgtctagacaccatttctgttgatgaaataaagacatatcattatgcattgtaaactg

SEQ ID NO: 313 - DNA, 352 bp, Homo sapiens
  ref <308>: DATABASE ACCESSION NUMBER: Contig31361
ttgaaagagtatataaacatagacatactgtgtttgccttttttaaaaaaagggctgtttaaatgggtcctaagataactttttgataatgtaatattgacatgataaaattgtaaacttcataattctggcacaggaacaatttatgaaaacatactaaggtatttgtaaattgatgaaataatatatatcttaggaaagtcataattattacacttgtacatacccttaaaataaaagagcctgcttgaaatgttgcaaaaagaaacagaaatacctgctaatatgcccttctaattaaggatgatgccaattaatctctttatataaataataaactttgagttgtttt

SEQ ID NO: 314 - DNA, 394 bp, Homo sapiens
  ref <308>: DATABASE ACCESSION NUMBER: Contig31646
gctgctacaccccatgtaaaaagcggaaaataaaatgaagattttccagcgcaagatgcggtactggttgcttccaccttttttggcaattgtttatttctgcaccattgtccaaggtcaagtggctccacccacaaggttaagatataatgtaatatctcatgacagtatacagatttcatggaaggctccaagagggaaatttggtggttacaaacttcttgtgactccaacttcaggtggaaaaactaaccagctgaatctgcagaacactgcaactaaagcaattattcaaggccttatgccagaccagaattacacagttcaaattattgcatacaataaagataaagaaagcaagccagctcaaggccaattcagaattaaagattta

SEQ ID NO: 315 - DNA, 578 bp, Homo sapiens
  ref <308>: DATABASE ACCESSION NUMBER: Contig31885
tcttgccccttcaccatggacttctcatggtgtcctgtaactcatctcccggggggcctggcatgttcacagattccacagaaactcattttcaacaatgctaacttggacctgtcagttaaactctaaggtggacagggttctcagtactaagcaaggaaacagaatgctttgttcctttaaaagactgaaaagctgaccttcaatggattgaggcacttttgcttttgtgttaaatgtagatgtgctaaaatatatagatctatcatattttacctacatatgtatgtcattccagtataaaacattctcctctacccaagaaccatagccatgattgttataaatcaatgaagtgtaaacatacattattaaaaaaccacttctgacattccattatgtgctattcaaagatggactattgaactatagaaaagacagactgtgcatttgttcgttgatcctcatcttattcctgacatgtaaaaatcaattttacgtagagtcaacattgtaggtaggttaaaataccagtggcaaatttggaaattcagaaacttataaaccacgagaaatat

SEQ ID NO: 316 - DNA, 396 bp, Homo sapiens
  ref <308>: DATABASE ACCESSION NUMBER: Contig32604
ccagtgaacaaattacctcgtcacccagaaaacaaagagctcaggaactattttggaagttccttccagtctaagactatggaactcagaatctagcaggtgtgttcctttggatagcaaaactaaagatataaatatgaataagaaattctttgccacttctcctgggcaaggttatactttatgccatctactgagataaaccagatgagtcagtttgcttctgtcagttgctgtgtcacagatgacatcttctcaaaataatattatctcacagccaagaaatagcgcttcgtttactgtgtttttctatcctgaaactaaatggcgtacgcttcatagtggctaagatactccacacacaactagtacccatagatcttttctcactgatag

SEQ ID NO: 317 - DNA, 684 bp, Homo sapiens
  ref <308>: DATABASE ACCESSION NUMBER: Contig33814
ctcgaatctgccatggcgaaccggcgagtggggcgaggctgctgggaagtgagcccgaccgagcggaggccgcccgcggggctgcggggccccgcggccgaggaggaggcgtcttccccgccggtcctgtctctcagccacttctgcaggtctcctttcctttgcttcggggacgttctcctgggagcctcacggacgctgtctctggccctagacaaccctaacgaggaggtggcagaagtgaagatctcccacttcccggccgcggacctgggcttcagtgtgtcgcagcgctgtttcgtgttgcagcctaaagagaaaattgttatttctgttaactggacaccactcaaagaaggccgagtaagagagattatgacatttcttgtaaatgatgttctgaaacaccaagctatattactaggaaatgcagaagagcagaaaaagaaaaagaggagtctttgggataccattaaaaagaagaaaatttcagcctctacaagtcacaacagaagggtttcaaatattcagaatgttaataaaacatttagtgtttcccaaaaagttgacagagttaggagcccactacaagcttgtgaaaacttggctatgaatgaaggcggtcccccaacagaaaacaattctttaatacttgaagaaaataaaatacccatatcacctatt

SEQ ID NO: 318 - DNA, 393 bp, Homo sapiens
  ref <308>: DATABASE ACCESSION NUMBER: Contig34019
ctgcttgtttttgtggagccgtgtgtgttcttctctgagcagctcctccccagaggaccccagcgcagtcccgggagatggcggaaagaaggcaccagggcacagtggacactcatcccgtgacagcgatggtgaccatgactgtgggagaaagaacaggacccgggatggagtggggctgtctgagtttccccagtgaactttgtgctttggcgttccacccctgttgttacttgttactgagtttcctagacctggggtgggtgttcccccaggaggaggggggtcccgacctgtgtcctgtggtggccatttgcagcttctgtgttgtgattcccttctcttcaacggtttcagtacatatctctcttcaataaatttcattcagtgttc

SEQ ID NO: 319 - DNA, 397 bp, Homo sapiens
  ref <308>: DATABASE ACCESSION NUMBER: Contig34154
ctcagtgagagccttccccttacaaaaaaacaaaaaagaccatagcttgctgccaaagcggatctgaccacgcgtcctctcactctaagagattaaaataaagcctcctgcagtccttttctccaaatacacaaagaagtggctgggctgaggctcaagggcacagttccagtccctgttggcaagagaagggcagggctctggttctcccaaagggtgcaaaggacaagaatgtttcctagaaaagaaaccagggaaggagaccaaagtagacctagctgatatggagctgttatgtgaaaactgaaagctgcttcgatactacttcaaagccagattattctgggaactgaagggagactgagccttcaagtaatatgactagggaagtcaagta

SEQ ID NO: 320 - DNA, 510 bp, Homo sapiens
  ref <308>: DATABASE ACCESSION NUMBER: Contig34430
gtttagttattgattcagcagtctctaattgtgccaaaaatggtgcttagattagattgccattgctacccatgggagctgctacttaattattcccacctcaaattcccagctctcaagttagcactactcctttgcaatttactccttctctgctcgtataaataccctcagatgatgatagttggtggccactatacctttgaagaggttgcccacttctacatggaaaggaaaagatggtttttttttttaaaagatgaatttgataattaacttgccactatttcaccttgtgatgaaacctcaattttaaacatagtgttaattgttttattgtccacagaattaagggtaagtaatgtcatacaatttttgtctttagtcttttagtatggtttctttaacttctattgagcttctgttgcagatattggacatgggcgtatcttctaacgatgtcgtcaccattagtatattcttcctgctaaaaataaatatcaaaccctg

SEQ ID NO: 321 - DNA, 474 bp, Homo sapiens
  ref <308>: DATABASE ACCESSION NUMBER: Contig34667
agaaaaagaaggaagctgggaatgaaactcaaaatgcacttgaacctggaagcggcaaccctcagctctgcgcgccgagcctcagcaagagttcgttttgtgcctgagttactactacaggggcaaactacccgtgcctgtgcgctgggagaacaaggtcagcgcccaagggtgtgcaaaggatgtggcaggcttcatggaggaggtggcatttgccctgggcctgggagaccaggttggattttgacagactgggaactcgggggacaggagggcagcacagtgtaagctaaagccctgtgtagggaccccacgcaaagacctcgtgggcctgggtgtccagggcaccatttccacccatgggtgaaaaagaggcttgaggaagacaacaggttcttcacctgcatctgtggatatatatttttttaagtttattaaatttttttttaaatggcagtttcagacctgcccttt

SEQ ID NO: 322 - DNA, 464 bp, Homo sapiens
  ref <308>: DATABASE ACCESSION NUMBER: Contig34766
tatcaccaatgtctccttgtatcctgttgtgaaaatcagaagactttctctttctccaaaaaagaataaagcaagcccagcagtggctctgcctaaacgtaggtgcacagccagcgtgaactataaggagcccaccctcgcttcgaaactgagaagaggggacccttttacagatttgtgttttttgaattctcctattttcaagcagaaaaaggatttgagacgttctaaaaaaagtatgaaacaaatacaatgaaggtttcgttggatattgtttaaattcaatctacacctctttctgttgcttcaggagaggatctgtaagagtacacaaacagagtgagccattgccatagaatattctcttgacaggaccctagctcataaacatttcttcagaactatacttcaaatgggatgctttgtattaaaactttaataaatttaatttattttttcttttg

SEQ ID NO: 323 - DNA, 419 bp, Homo sapiens
  ref <308>: DATABASE ACCESSION NUMBER: Contig35030
gaatcaggaaagaaattgagccttttctgccacctctgaagcctgattactgtgtgaagcaggccatgaaggccatcctcactgaccagcccatgatctgcactccccgcctcatgtacatcgtgaccttcatgaagagcatcctaccatttgaagcagttgtgtgcatgtatcggttcctaggagcggacaagtgtatgtacccctttattgctcaaagaaagcaagccacaaacaataatgaagcaaaaaatggaatctaagaatctttttgtatggaatattacttctatcagaagatgatcaagatgtttcagtccagtgcacatcagcattgctgacattttatggattctaaacttgtgttgtttctttttttaaatcaactttttaaaaaaataaagtgtaaattaaccgac

SEQ ID NO: 324 - DNA, 360 bp, Homo sapiens
  ref <308>: DATABASE ACCESSION NUMBER: Contig36243
tggcccctcgtggtgaagggctgcacgatgatccggtggaagataaacaacctcattgcctcagaatcctactacacctacgcctccatttccggaatctcgagcatgccatctctgagacattccaggatgggctccatgttcagctccaggatgacagaggacagggctgaacccaaggaagccgtggagagacagttgatgacctgagtgtcccacctgccccagcccccagttactgtcacgcctctcttatgaggcccatcttgaagatgcaacctgtcacccagcccaggcctctctttctgttttgcttgatgtttacttctcgttcagactcaaataaagccttttttcagg

SEQ ID NO: 325 - DNA, 465 bp, Homo sapiens
  ref <308>: DATABASE ACCESSION NUMBER: Contig37198
gtaggaaagtgactggaagtggactccagagggacaggtgtggtggcacagtcctggtgtggtgctgaccacccaaatatgactgtgaattgtggaaagggcagtagatctctaatgtggaggtgggaacattattgtggtggaggcaattatgagggtagcatttctttcgagacaaaacacccgtctgggaaggccccaaggtcagcttatgaaggaccccacttgcaccccaccccagccatggaagagcagctggagggtggatggggaggccagagggagcaatgaggggtggtcccagctctgctattgactcggtatgcctttaggacattctcttaccgctcatgggcctcagtttcctaaagtgtgaaatgtcaggcacttccctctaactggcatgcaacagccccacctgcctgagagccctgaggtgacaataaaacatttatgctcaagggg

SEQ ID NO: 326 - DNA, 447 bp, Homo sapiens
  ref <308>: DATABASE ACCESSION NUMBER: Contig37966
aatatatgatgtacccagggaccagaaagaaaatttctttgcatcttagaaatggtagacattcattgtgactaaagagcttctatgcttccttgtttccatgccaacatgctgagcatgctcacaaagaaggctcgtccattcctcctgtgttttagtatttggcccagaggtttcctaaatggttgccttgaaatcactgtggtccaaatgtaattcttacacactcaaattatcactgtctgtagcacacttgtgcacctgtcttacattctctgttgctcccccccacactcttgctcagtctgtcacctgttcagtctgcttactcactcaattgttacccttttgctgttgtcgtgtttacagtttgcattttgaatgattagttgggattaccaaacattttttaaaaagatattatcaataaatatttttttaattcta

SEQ ID NO: 327 - DNA, 344 bp, Homo sapiens
  ref <308>: DATABASE ACCESSION NUMBER: Contig38463
cgggtactttccttcctctgggcttccactcatgctattccctgctccctttttctacctggagacccccattcctcctcctcctctgctgccctcacctccacctgggccctcccagctcccgggagatggctgaaccccactccccacccgctagtcatcctcttcagcggtcctcccagagctgtcctcagcatggcagcctccacagcccctgggtgtcacccccggtttcgtgtctgcctcggactccagacctgcccctcccaggctggcccagatggatcctctacagtgactaacccaaaccagcaccaggcagggacccaataaacctttgtgaa

SEQ ID NO: 328 - DNA, 413 bp, Homo sapiens
  ref <308>: DATABASE ACCESSION NUMBER: Contig38901
tacatttttgtttaatgttgggcctgaggttaactgtgaccatggtccagcttgagtggcttctggagcagccacattttcaaggactgtccaaaagccagccagttcagggctcaggcctcacccattgcccactcctggggagaccatcacctggctcatcgtttccaccaagagtgccccacaggagtgccccacagacccgctggaccagcctgctgcgggtcctggccaggggtctggctaacggtgagggctgactctgaactgtctctcagtctccagaaagtgttcaagcctgttgtgttcccaaatctgattcctcctattgtcttgtaaatcaaactctaagtgaaaacttcccatttgtcccttcaaagatttttttttattaaatggttttttaagatcct

SEQ ID NO: 329 - DNA, 646 bp, Homo sapiens
  ref <308>: DATABASE ACCESSION NUMBER: Contig39031
tctctgtctgtctgtctctttctcttcctttttagaaagagcttaattcccgagatggagcttgggaaagaatatgtggcgagagggaccctttcatcctatgcagcttgatgtggtcttgggtggagcaactgaaggagcctgtaatcaccaaagaggatgtggacatgttggttgacaggcgagcagatgccgcagaagcactttttttattagagaagggacagcaccagactattctctgcgtgttgcactgcatagtgaacctgcagacaattcccgtggatgtggaggaagctttccttgcccatgccattaaggcattcactaaggttaattttgattctgaaaatggaccaacagtttacaacaccctgaagaaaatatttaagcacacgctggaagaaaaaagaaaaatgacaaaagatggccctaagcctggcctctagctttcactcgtggtgaatatttcagacctaaagatccagatagtatctctgttcatatgtgaataagttgaagattgtggggctactttttctcatagcactttattttgaatgttgttagtttgtgctgagaatggtcgtccgtatttgaaccaattatttattttaaaatatatttaagctacatttttgttttg

SEQ ID NO: 330 - DNA, 470 bp, Homo sapiens
  ref <308>: DATABASE ACCESSION NUMBER: Contig39795
ctttggctcccatttatcacacctcaatctttagccatactaacctgtcattcctcagtctgaaatccttctcccttttatttaaaatcacaaacctgacttaccctgcttcttatattttaacatcatttgtctctcaagttgaaatggaaacttgttacttacctttgtaggccctctagtaactagcttgtcagtgttgaaataaaatctctcacactttaacgtttttaatggggctgggtgggaaaattttcagtgataagtgtggaccttgctctgatgccaaagtttggcgatctgaaagggaaaatgagacaaattgtgaacatcttgtaattctgtctagagcctagcagcaatatatttaactaggactgcgatggaggatttataacttttggcttcttccactctgcttttgtaaaaatctcacatcacgaattttattcctttcactctggaatgag

SEQ ID NO: 331 - DNA, 389 bp, Homo sapiens
  ref <308>: DATABASE ACCESSION NUMBER: Contig40120
cacctgcatttgtcatcttgagcaaatatagtaactctaacctcaaggttcaagtgatttactcaaggtttaaatcatagttgttttggagaaagtaagtgtcagatgcactgtggctgtcagggtcatagtaggcatttaatcaacatggttggtgttcattaaatgtggattgaagataaaatgactgatcttaagtttcatgaggaataggtttgcttcattgaaactggtttttatcttcccaaatagttttcaatcattcctttaaagtactaggttgattaatattgcaaagttgtaatgtaaaatgtgaccttacctctgtctaacctgtattgttcacatgaatgggagtttgactttgggaataaacattgaaaatttgc

SEQ ID NO: 332 - DNA, 391 bp, Homo sapiens
  ref <308>: DATABASE ACCESSION NUMBER: Contig40552
caccaagccctgctccggcacctcgaatccctggcgaccatgagtcaccagctccaagccttactgtgcccccagaccaagagctccatcccccgccctctgcagcgtttgtctagcgcccttgcagctccagagccccctggcccagcccgtgactcctctttggggcctacagatgaagctggctctgagtgtcccttccctagaaaggcctgaccctccttacccaccagaacaggggttttgatgccctcactagtgttgaagcctgttccagagagaggtgggactgcaaggagaggatggtcagccctacccacctgccctgtttgagcttcctgtttgacaatgtttgctgttgattttttgttcaataaagaatttggtaaaa

SEQ ID NO: 333 - DNA, 495 bp, Homo sapiens
  ref <308>: DATABASE ACCESSION NUMBER: Contig41413
aaatattcttaatagggctactttgaattaatctgcctttatgtttgggagaagaaagctgagacattgcatgaaagatgatgagagataaatgttgatcttttggccccatttgttaattgtattcagtatttgaacgtcgtcctgtttgttgttagttttcttcatcatttattgtatagacaatttttaaatctctgtaatatgatacattttcctatcttttaagttattgttacctaaagttaatccagattatatggtccttatatgtgtacaacattaaaatgaaaggctttgtcttgcattgtgaggtacaggcggaagttggaatcaggttttaggattctgtctctcattagctgaataatgtgaggattaacttctgccagctcagaccatttcctaatcagttgaaagggaaacaagtatttcagtctcaaaattgaataatgcacaagtcttaagtgattaaaataaaactgttcttatgtc

SEQ ID NO: 334 - DNA, 900 bp, Homo sapiens
  ref <308>: DATABASE ACCESSION NUMBER: Contig41990
acaaagtataaatgtatatatcaactgaaggtaactacttttttcatatttggagttttaaacttttggtgtttacctcagactgatgttacctcttttatatttttatgtcttaattggctcggatgatgaacttgtgcaatcttctaccaacaaagttcaagtggcatcattttatatacatgtatctttttcaggtattttctatacaaattcttaatagatggaaaattagactctactttggtcactaatagtctttcatttgtatattgaagttaccttgccccttggagttattgaagtgacatgtcaaggtatcacctaaatattcttcagtcacactcactggtatttctgaggctttgtgtgttaacaggccttgtaattgacattattttggttaatgtaaccccaaaattgctttagtaattgctctttggcatagtcaaactataaatgaaaatggcagctttacaaatagtatatttaagtgaactctggaactatggacatgaaaaaaatgatggctgggatttatgatttttgtctggcagcaaacaggtttgtccagaagtctaataattaagcagtcataaaaagtctgaatttagtaaaccagtgtatgatgttattcaaatagtttaccttgggtatgagttcattttataatgtctgatgacattagatctcttaaaactttatgtattttttttagttcaaaggaatagagtcttgaagagaaaaaattatagggcagaaaagataagtgttcaaaattggcaactggactattattatgtctagcatctcattctaaataactaaagcttgatttactcttgctaggattatgtgactactaggtaggagcctcttaaaacactggccctgagcatt

SEQ ID NO: 335 - DNA, 415 bp, Homo sapiens
  ref <308>: DATABASE ACCESSION NUMBER: Contig42036
gagagcagcttcccttggctctggggccgtgttgccccagccacgtttacaggaaggtgtgccccagaggaggaggaatcagctccctcgctccagtggccttgggtccgggtctcactgagcagcccgagggccactccagcccggctggggaagagagtcctgaacggtttgatgtggggatggggtggtgggcagtggggaatagatggttgactttgtttctttatttgtgccattgtttggacaatattaaagctgcatgtaaaaggggaaattagtatatgatgtaggctaaaagtgaaatcatagtaacatatgttttagtattattaacttttttctgtacaaatattagcactaaatgtttaaatatgtatgaatgccagaaatttgtcagttcatgcagtaggat

SEQ ID NO: 336 - DNA, 680 bp, Homo sapiens
  ref <308>: DATABASE ACCESSION NUMBER: Contig42103
accccatcttttattgcagtgactgtgcctcccagttcagaaccccttctacctacatcagtcacttagaatctcacctgggtttccaaatgaaggacatgacccgcttgtcagtggaccagcaaagcaaggtggagcaagagatctcccgggtatcgtcggctcagaggtctccagaaacaatagctgccgaagaggacacagactctaaattcaagtgtaagttgtgctgtcggacatttgtgagcaaacatgcggtaaaactccacctaagcaaaacgcacagcaagtcacccgaacaccattcacagtttgtaacagacgtggatgaagaatagctctgcaggacgaatgccttagtttccactttccagcctggatcccctcacactgaacccttcttcgttgcaccatcctgcttctgacattgaactcattgaactcctcctgacaccctggctctgagaagactgccaaaaaaaaaaaaaaaaaaaatcaccccagccatttctcttcatcctcactaacaatttggtaatgaagtattgatttccacttctctgcttatgggcggtattagattttcattgataaattgcaatggggctgtctcgtctccacagtacccttttcactgtcacaagaaaacaaagtgccaccgaagaaaagtaatgactgag

SEQ ID NO: 337 - DNA, 586 bp, Homo sapiens
  ref <308>: DATABASE ACCESSION NUMBER: Contig43289
tggcagtctgggctggcgtggtaggaagggctttggtgttcatggaatgggcctgctgctctcagaccttcaaaggatggaaccaacgaaggaccaaatgagaaagcagatgctgtgccttgcagagggccatgaatgtcagttattatttttctccttatacaattattttgtggttattattacaatgtacatggctgttgcatagaagacatgactggtggaggctgaggaaagccatgacattctacaattgccatcaggctaaggccccgtgagcatttctctcccttgtaatattaaccctgtatttctgggatcacatcacggaatattctttgcctttccactttccaggaaatctctcggactgggctaccctccttgtgtgtgatgaaagatgagctatatttcagaacaaagtgctgtgttgtcatgatttgcctggactcccagggcgtctcttacccaacttgataacgatgctgttcattagcagcctttgttaactgataaccaagagcggtaatgtgatactcataagcaattttctgtgtgtaggataaaataaaccatcttgtatggg

SEQ ID NO: 338 - DNA, 420 bp, Homo sapiens
  ref <308>: DATABASE ACCESSION NUMBER: Contig43648
ccaagccccagtaggagttggggctgagatcaggaggaggggaaggatatgagttttccatccatctccctggagaaggccatgacgggctctccaagccctggggagatctggcgagggactagccaagtcagggtgacctcttgacctgactagtttttctaacccacatgaacaccagggtgcctctctcttcctctagcccagggtagggggacctgagtgagagagagagtgagacagacagcaagattgagacacgcgggcccccactggtctctgagtgggaaaggcaagtgcgagagataaaggcctccaagagaaaaaagaaacaaaccaaagatttaaccatttaaaaaaaaaaaaaaacccacagacaactccgctacctttttatatgttggaaaaaaagtgaaaaaa

SEQ ID NO: 339 - DNA, 431 bp, Homo sapiens
  ref <308>: DATABASE ACCESSION NUMBER: Contig43747
ctccctgtgccacacagacacactaggcctgtgtatttatttccccttcaaagcagactgaggagggaggagacgaggttctcttggcatcactttctccctggctgcagaactagacacccttgaagatttggcctgggccagtgagactgaaatcaagaaaaacagaagggatgtgcagggtgggggggtccacttcctgctcccatgtcaacccccagggcctccagcgtgcagacgcgtgtcctactcatctgctcccacggatgaccctggtcttcaatggttagcagaagggagaaaagaaagcaggaaaatgtgctattgagattccagtggtgacttcactgatatttagtgaatatttgatttagccaacatgcctttctttatgtgattttgtattaaagtaaaatgatttttatactttc

SEQ ID NO: 340 - DNA, 535 bp, Homo sapiens
  ref <308>: DATABASE ACCESSION NUMBER: Contig43759
tgctgagggagtggggggcccagccccttctcttctcccccgccaaaccacagtgggagctggggcagggggagagccaggcaatcgggggccaaagatgggggtgctcgcctacagtctgcatctgtagtgccttgtggggtatccaggaacaccctcccagcaggggatgggaaccctgtcccatgaagccctctcctcagctttacttgctcccccgcccttagccttggggagaaatggcccgtggtgggctgaccccccaccctccacacacacagttccatgacccagcgggcccccaggggcatcaggtgctggtcctcctccctcctggcctcgacccctaagggcttcgcccctcccaggggcctgtaactaagtcgggtcctgccaggcagggggcctgtgttctgtgccccttgggagacaggaactggcgagttcaggtggggtggggacagcacagactgttccaccgttgtgcatattgttgcttctgaaccacaaactgtataaatggatggttttttgc

SEQ ID NO: 341 - DNA, 946 bp, Homo sapiens
  ref <308>: DATABASE ACCESSION NUMBER: Contig43898
ctctgaacaaaactaaaggactgattttctgaaagcacctgctaacaccttgagctttttactttcctgggagtgtacagggttaggaactgagaaagtgcacttcctcaggcaacagatgatctggtcaggcaacccacccctggggcccactttctgcagcaagatgggagcaattccaaggcaagtgggtatgggaatagcaactaaaaaggggtgaacttgtctcagcccccttttatggtagggcacttcaactttaatggggtgggcggctacagggaggagaatcaacaaagcaagagaacttgactatgtacgtccaacttcttacagaaggagctttgctaccagaacaagttcactgtgtcaatgaagttcatgacacctcatgcacctttacagatatctgggaaagcctgagaaattcattgagttttatgtattgaagggaaccaggtgattactcttttcaataagagggattctgctcaggtgattagactttgactctatttccccagggacagtgatgggtgggccccagagctagttgctgtctggtgtttgctggtgaaaacatgagcagtagttatgtggggctgagagtcaaaagggaaagcctaattaattcaactaatgtttattaagctcctactctgtgcaaatcactctactcaagaggagctcacataagagtgcaggataaagaaaggagatggacagttatatgtaattatataaactttgtgtattttgtttctcatgaaaaaacccctttggcaccctgctgattgatttggaagaaatctgatagatttgtggcctttcctaaattgcactaggaaattatgtagttagaatatttggaacctgcattagttccagcaatgaaagtaagacacacagcatatgacataagacacagtgtgaaataaatgagttt

SEQ ID NO: 342 - DNA, 534 bp, Homo sapiens
  ref <308>: DATABASE ACCESSION NUMBER: Contig43927
gaatgactgttttagagtacccatgtgggttccctgagtcacagcaggggatgtttaataaggaggttagcactgagcttggggacgtgctgtcacaccagcaggacgctgcaggaaggagcaggctacttcctttcttgacgtgcaaataactcgtataggctaatcaacaggcttataagttaaaagggctaccgctcggccccttggggattccatcccctcctctgtaacttggagatgtttgtttctgctgcagactcagagggttgcgatgaagagtggtgggactgagttgagaagcttatcccttcgctgggtgggaggtttctaattgccccgttctttgggggatccttaagtccagcttccaggtgggggcagcgataggaccaagttctcctagtagtctctgggaagccacttgagggaagctgccggtcatcccatgcacccattggtcttctccagcaggccctgtaggtcgtccatgttccatgccttctgggttcttgggggagaaggaagctgttg

SEQ ID NO: 343 - DNA, 552 bp, Homo sapiens
  ref <308>: DATABASE ACCESSION NUMBER: Contig44291
tgggccatatttgccttctaatacattcctgcaatatgtagtggtgatttcccttagcttcctcctactacctcttatactcatctccccaaattatttgcctcccttaaataagttttcctagaaggtaagctggtcaggcaatttgaaaaatattagatcccaagaaatctattccgtttgcattggacttctcggattccatgtgtttgcagcaggactacatcgaactctgatgtgccggattgtggcatgtctgcatgtctcatccatctattgtttttggtaactcagtttggaatttcagtgtctgtcttccctgggttgacattggaatcagcctctcctttgagcttattttaactcttgagcaacataacatagatttaatgtgaacagtttataccaaagggcagcctgtgcctgtttatggatcctctctgcctttgtacttgaagagcgcattttacatttccagtcctttcacagacaggagctccaaccttacgatggagaattaaacttgcttgtatttccactttgtggatgagg

SEQ ID NO: 344 - DNA, 710 bp, Homo sapiens
  ref <308>: DATABASE ACCESSION NUMBER: Contig45032
aaagataggcttctaagttaaggcaaatcattcattctgtcattaaacaaatacaaaccaggcacctgtcatatgccaagtgatattcaaaatggcccatgtagacctttgtgaagtatgtggcctaacagacattaaacaaatgtctgtgaaactgacataataaagtaaggtaagttatatgtgagacattctctttttataataattcctgtaaagcagtacttacttaggtaatgatatcatactgttttgttttatatttttcctaagagctaaaacgtcatcctctcttcagtgatgtggactgggaaaatctgcagcatcagactatgcctttcatcccccagccagatgatgaaacagatacctcctattttgaagccaggaatactgctcagcacctgaccgtatctggatttagtctgtagcacaaaaattttccttttagtctagcctcgtgttatagaatgaacttgcataattatatactccttaatactagattgatctaagggggaaagatcattatttaacctagttcaatgtgcttttaatgtacgttacagctttcacagagttaaaaggctgaaaggaatatagtcagtaatttatcttaacctcaaaactgtatataaatcttcaaagcttttttcatctatttattttgtttattgcactttatgaaaactgaagcatcaataaaatta

SEQ ID NO: 345 - DNA, 475 bp, Homo sapiens
  ref <308>: DATABASE ACCESSION NUMBER: Contig45441
catgtggaggtgggaaaggtgacagagtagcatgcctccaaggcccccttcatcccagtcctgctgtggggaaagtgggctttgaacgggatccaagtctaagatgtttccggtgagctgccagggacaaagggctctcagacatcttgggtccccagtggctggggtgggcaggggctgattcagccaaaggaggctctagcccagaacagaggaagccagagcccctgccccattcttgagcctcacagagcttgtccccgagttgattcactgtgcaacacaggcttcagattcatgtatttgaaaggtattcatgatgttgttctcttatcacctctgcccctcacctctgtgaattatcatgaagagtcctttaagagtataaatagaagacaaagaaagatgctattaatgttattttgccaaaaatatttttgtagcataatatattaataaaagatattatgaattc

SEQ ID NO: 346 - DNA, 472 bp, Homo sapiens
  ref <308>: DATABASE ACCESSION NUMBER: Contig45565
ggacacagagtctgggatctaataattcagtcattttggatggactaaaaagaagacagaattttctgcaaaatgtcgaaggcacaaagagcagtcaaccactcacatctaattccttactaccgctaactccagtcataaacgtttaattttcttttggaaacctacttttttctttataaaaaggtagagcattattacagaatctttcaatcatgtaagaattgagtatataagaattgtctaaaggcaagcatatctatactattaaccacattacacattttgttctaattactggctttttttcctcttttggtgtcttaaggctttttgaagcttattttactgtgagtttattgggagtatatagattattttcgattaaaaagtggaattattggtccccttccaattgtaattatcttgaatttttatacattagtttctcaaatatatagaatgccaattt

SEQ ID NO: 347 - DNA, 907 bp, Homo sapiens
  ref <308>: DATABASE ACCESSION NUMBER: Contig45816
tcttatgtcagctctttctatcacatggcagctgacctctcacgctccactctgcagcttggacacccagtagaccctgaatttcactctctctaaaaggttctgagggctcatcctgggccaggggccctcctgtgcactgttagctatggccacgggagcctccagagctgcctggtagcttcaggttgacctgcttatcaggcctacgatccttctgatttaagtacagctggaaagtattatctaattaagttcatgatagtgcttttggagaacttgtcaaattacagccaatgagaaaataaggacctagcataccgtggagaaccattaaaaatttgagaagaaacaacaagtattatgtcaacttacttcaaaggcgtagttttgggaatttgatgcagtaaagattaccctgttttatgattgttccttgaaagtcaaatgggggacctgtccattgtgctctattaatcttgtcagaaaactgtcaccaaaacaaaatttgagtttgtccttgttctaggagttactgggtagttgtaagtataatttttattaaatataatgtaaaataaaatgttaagatacttagttttgtttttcaaagtaaagctgtagtcagcgttatgtatgccattgactctgaaatgtataccagcctttcactgtgtaccgtgtgtatataaatccacagaaccggatgagctgcttagggagggaatatattcaaagtgtaccaaggaccaaatcctggagttctcccaactttagaggatggaaaggggcagagtaatctagcaaaggagactgaggccagtgaagtaggaagaaagtatttcaaggagagtgatgattctgtgaatattgctgagaattcaaataaaaagaggactgagaactg

SEQ ID NO: 348 - DNA, 611 bp, Homo sapiens
  ref <308>: DATABASE ACCESSION NUMBER: Contig45821
tgtctgaggctgctcaatgagataattgctgattttgatgagctgctctccaagcccaagttcagtggggtggagaagatcaagaccatcggcagcacctacatggcagccacaggcttaaatgccacctctggacaggatgcacaacaggatgctgaacggagctgcagccaccttggcactatggtggaatttgccgtggccctggggtctaagctggacgtcatcaacaagcattcattcaacaacttccgcctgcgagtggggttgaaccatggacccgtagtagctggagttattggggcccagaagccgcaatatgacatttggggcaacacagtgaacgtggccagccgcatggagagtacaggagtccttggcaaaatccaagtgactgaggagacagcatgggccctacagtccctgggctacacctgctacagccggggtgtcatcaaggtgaaaggcaaagggcagctctgcacctacttcctgaacacagacttgacacgaactggacctccttcagctaccctaggctgagattgcactcgccttctaagaacctcaataaagagactctggggtgtctggagcccattgatgtctga

SEQ ID NO: 349 - DNA, 634 bp, Homo sapiens
  ref <308>: DATABASE ACCESSION NUMBER: Contig46351
ctagctttctgaatgtgagttccatccatatcctttgcataacggtggtactgggctgtggagagcttggaatgtgtgtccatggggaaatgggctgttctggttattataaaacggccaagggagggctccatggcacacctctgagtaacccaggacactcctgtttgggaaatgcaaaccatccatacggcaggggcacaattataaagattgatcctgtcacgggaatggtttcaaatctgaccaacctcatggcatacattggggaagcaattgtgaaaccccttgattctttggatctggacatgctgtactgtgacaatggtttgtgtgtgacagaaaatgtagctgtgtctaccgggaaagactggggaaatttcttcctgtggagttctttataaagcaaaagtgcatgaaactgtcagtaatattgtagtctataaagggaaattgctcttagaggctaatattgcacaatgactactttttttgcttatttggaaaagatctttatctcttggagtattaagaagtcaacatataattgccaccctatacattgtgttctggagtgcctgatttattgaaatcagtgtgaaacctattttaaataaatatctatttcaaaacc

SEQ ID NO: 350 - DNA, 401 bp, Homo sapiens
  ref <308>: DATABASE ACCESSION NUMBER: Contig46756
gtgtacatctggtgcttttcatgtgtcatttgtgagccacaaatgcaaagttgccatttgaattcagtcaggctacagggtggtgtcagtcaaggtctttcaggtgggggagaaattggttagggctcccactgccaaatgcaagcagatagcataacctgactgttatgtgccctcaggcagcatgcttagggacaactctgtggcctgggggacatctgtgtcacagtataggattgccattcaggtgttttgtacctatttctttcctgacgttgtcccctttttttgtactgatccaactgggagaacctcagccaatgctggaagtatgattgaagtacctctcttttgtgactcttgtacagcttaatgtgcaataaaggaaaagttatatctgt

SEQ ID NO: 351 - DNA, 530 bp, Homo sapiens
  ref <308>: DATABASE ACCESSION NUMBER: Contig46796
gtctttgactgtatggagttggtgatggatgaactgcaaggatcagtgaaacagctgcaggcctttatggatgaaagtacccagtgcttccagaaggtgtcagtacagctcggaaagagaagcatgcaacaattagatccctcaccagctcgaaaactgttgaagcttcagctacagaacccacctgccatacatggatctggatctggatcttgtcagtgactttatgagagtttctgccacaaggtgcccaagaggagaggaatgggaagagtgccccagcacgtggtgactgcgtgatttctgctcgttgcctttgaagataactggcaggactgactgtagatcactttgacttttttcaaaaagtgatggaatttgtacatccaaatgaatattgtatagacaattttcccaggaatgtgcaaaatgcttgaaagttcaaacttcttttttgaaatgatcttcagatccagtggcccattcttttatctttatcctgtgaaggtgtttttcaggttttgaaacaa

SEQ ID NO: 352 - DNA, 493 bp, Homo sapiens
  ref <308>: DATABASE ACCESSION NUMBER: Contig47308
ggaataaactggataacccagacagtccccacagaatttctttcaggtcacagatttcttaaaactcacccccaaaatgtgcctgcttggttgtttgaatcttgcataattaatgtcacaggcgcaagccgctgaacttagttgagatgcagaaaacaaacaaatgcaatgacatatctgagaagcatttatgtaactccggttaagtggtgaggaggggtgtgtgaagacagtgtgcatgcatgagtgtgtattcatatatatgtgtatacatatgaatttcactgttattttccagggtctatggacaatgtggcagtaagagtctatgatgttctgaaacttttcacagtaaatccaaagattacagaccttacaaggtgcttgcattctgttgcttttccatctgtcacttctcaggttatttgactgtgttcaaaccttcttttctttttcattgagtttcattttttaagcttgttaaatgcttttg

SEQ ID NO: 353 - DNA, 773 bp, Homo sapiens
  ref <308>: DATABASE ACCESSION NUMBER: Contig47793
cagcctgttcctgtgacacccaaagggtcacaattagtggccgaaagtttcttccgtaccccaggtggacccaccaagccaaccagctcatcctgcatggattttgagggtgctagtaaaacctccttaggaactctctttgtcccacagcgaaaactggaagtctcaacagaggatgtccattaatcaacagatgttggcttagtttaattttctaaagagttgtttaatagagaaaatgtacacagactgatttggagaacacattctctgaaaatactgtaaatacgttggggatttgttcaatgtgaaatcagatagttgttttcatacatatatatatatatatacacacacacacacacacacacacatatatttgtataaagctaagtttagctttcaatcctacaaaataaaagtaaaatgttgaactctaagatatattaacttctagggggaaaaatccattattttagctatgcctatactattatgcaaagtaactgtattaaagtttacttccctctaagcaagtatgcttgacatgcctaacacagcattcccttaaacattttgcacaaagaaaatgctgtgtgatgtataatgttgtatttttaaataggggtatagctatattttttgtaatttctttaatctgttgttgcagtgtatctttttgtaaagtttgcaacaatcctcaatcaagtctatggaaaaattatttataaaatgtatttttaatcataagttgttcaaattaaaacttttct

SEQ ID NO: 354 - DNA, 592 bp, Homo sapiens
  ref <308>: DATABASE ACCESSION NUMBER: Contig48215
gctgaattttctctttaatggccattggaagagtctggttcagtttttcccaactctcttcccactcgtatttggggcctctgggttttctgaaggcacaaggactgtgactttgtaccactaacctgtggttcaaacctgggtgtgtttctggcatctccctaacccagatcagcaatggccaccctgctcctctgaggtcagcagaagactgggaagcagaggtgagggatgcaggccacactggaatgggaagtcttttccccactggatgtgcctgtctggtgggttttggaccttcccagactacatctctaggagaggcctgtttggagtagtacactgagagaccctggcctcttctgctggaagactgtccaagtcttggggtttcttgagctggtgattcctctgccatcctgctctctctcttcatctcaggcagcatggggtccacttttgtccccaaacctaatgttttaatccaaatgcaaattggttccacatttttactggagggtaatcagtttttaaaattcacacacatgtaatcgaaacgcaatactataaagttctactggtgagactcctg

SEQ ID NO: 355 - DNA, 506 bp, Homo sapiens
  ref <308>: DATABASE ACCESSION NUMBER: Contig48353
ctatatggataagaatgcaggtagataatattctaggcataaaacatttaatgtaccttacctcatgcaatattctttggattctttgttgatttatgatattgctaatataatattttcttaaaatatataacaatatcttttatgcattttgagttccagctggtgcttctttatatttagaaattataatgggaaggtcatttaatttacagatggttttaaaattgaggtaatatctgaggtggcataatttaaaaatatttagcaaatttgtttcatatatactgtcttatttctagatttgtttaaaattggaatatgaaaaactaatggataaagctagcataaaattgatattttagtttgtattattaatatatcatgttaccttatatattaatctactcttgattctgctaattattaccaacaaaattgtattcatgacattttattaatcctctgtgaattttctgtaaataaaattatttctgaaaatctct

SEQ ID NO: 356 - DNA, 907 bp, Homo sapiens
  ref <308>: DATABASE ACCESSION NUMBER: Contig49270
ggccttgtatcccaaggactaaaagattagcacagacacgttttgatgttgaatgaactagtaagtcacagtaggtggtagtcttcattgatttctctgtaagtttttaaagaatgtatgaagatagtcacgaatgtactgagtgttcgcatcccccttcagttcaccttggctgtgtctacaggacaacaaatgtttgacagggaataaagtcgtgtctggtgtcatttgcgctacgtgcccctcccctttcggtgttggctccaaaccttcctttccttttatgtttgtggggagtggggaaccacatcagcagcaatcatcaaccaaccaaccaatgggatctacttagtggtgaatagattggctatttaattggtaaaagttgctggtctgaccacaccacagcatgaccactgggttcatttagagatggcctccgtttccaacgttccccacaaatgtttgcttctttcccagtcaagaggggatctcgagactcccgagtggaggtcgtgagcttgcaccccgcctggctgtgtagatcgactgtatagatacatgaagtgggggtgagggccaaggggctattactgctgttgggaaatacttgcctctcgtagatccagccttaatgtttttctgacatcctagtaatagcagaccctgcacaaagtggatatcagacttaatactgtgaggagacaaaataatgagaatagttttaccaaagataatgaaatctcgcatcatgtctgcattttaccatagattggagtgcatccttaggaaactgaatgtaacaaaaacccaggacatttttggaaattgtatgctctctagcaactttgtgtgaatttttatacaaacactgttttatgagttatataaaatgttataaaaataa

SEQ ID NO: 357 - DNA, 1021 bp, Homo sapiens
  ref <308>: DATABASE ACCESSION NUMBER: Contig49279
caaaggaagcttaggacccgtgggaatggcaaaacagttcgtccatcctctgtttatagaaatggaacagacatcatctataattatcatgggatagtttccttgaaactggaggatgacagtttcccaactcacaaaaggaaggccaaagtatccatcattagtcagccacaaaagacaatcaaagtggcagaactgcctcaagcagataaggtggaatccacaactgactcacacttccccagacaggaccagttgccctcatttccaaagaactgcactctggaattaaagggactcttccattttgaagaaggcatccagaagctgtatcagtgcaatgggatcgcctggaaagcctgggagtccccaaaccaaggatgtggaagacaaatcctgtccagccgggtggcaccagcactcaggctactgtcacatcttgatcacagagcagaaaggcacctggaatgcggctgcccaagcttgcagggaacaatacctgggcaaccttgtaactgtattctccaggcagcacatgcggtggctctgggacattggtgggagaaagtccttttggataggtttgaacgaccaagtgcatgctggccactgggagtggatcggtggtgaacctgttgccttcaccaatgggagaagagggccctctccacgctccaagcttggaaagagctgtgttttggttcaaagacaagggaaatggcaaacaaaagactgtaggagagccaaacctcataattatgtgtgttccagaaaactctaaatataacagaccctacagggggccacctggagtttgtcacctatttattcacaggatctgtgaatattgctccatagaaaacaaattgttatgattgagtgggtatacctttgtgattctgtctagtgaaaatgggacatttttaatagtgccagaaagattgataaataaatattttttacaagataagatacaatttttgtatctcaataccttttaaaataaatgccagcagtatta

SEQ ID NO: 358 - DNA, 628 bp, Homo sapiens
  ref <308>: DATABASE ACCESSION NUMBER: Contig49773
caaagcattcaagagtttcagcctgttctggtgaggggctccctgacttacataaagttttcagtgcaattttaatagtacatatgctttaatttatttttcttctgcgtgtggtcagacccaattacactgtggctaagactctcaaagtgccagggtttctgtgatgattctgagaatgctgaatacaaatataccttatattctttaaggaaaacggaaaggaaagatcagcagaaatagggttttctcatcttcaccatcaataaacatttattgcgtacctcctatattctgcaaattttccccaaatagaagccagttcagtccacaccatctcttctttgagttgtttatggcctcccttaaggcattttacaaacccataagcctacaatagatgagtatttttactatttgtattaagtgtcataatagcatcaatgtgcacattaccagtatagactgttggagttcactgattgttttcatagatgatgcttcttggggaaaaatagtataggatgtgaaagttttgaattacggttatttaaaaactaacatttgctatggccaaagtgtttacaataagcaataaagtgaaagaacctattataacacagattat

SEQ ID NO: 359 - DNA, 667 bp, Homo sapiens
  ref <308>: DATABASE ACCESSION NUMBER: Contig49869
tttacttgcttttgccctgaagttcagtgtagtggtttgtttggggcttgcaggaagaaacaaacacactccctctgactctccacaacccatctttgccttctgcaaccgcttctcctgcccatcgctggttttggggtaggctctttgtctgcctgaggccccgcactcgcagggcaagaagcttaaaggaatccaactccaaactcctccgaagttaaatattgaccagaacctctttcaacaggccgcggttgccaggaaccgtggagggccaactcctcccaaccgccctggtgcaaagtcccacgcggcgaagagttttggagcagcgcttacctagaaagatgtttaaattctgaaccaggaattgtctccaactccaggcgctcagggaatcgccttttccggtgtccaggcgctctgcagacaaataaacagcagaaggtgaatggcggctgcgagggaagggagttggaggccgggagtgggaagcgaggctcatgcgggcgccaaggtggccctgggggtgacgcgaacatcagggagtcaccagggcactcgtccgtgtggcgcactcattgctcgaaatgttccagtctacaaatggtccgaagatggtgatttatttttgtaaaataaatacatactccatctccacacccat

SEQ ID NO: 360 - DNA, 539 bp, Homo sapiens
  ref <308>: DATABASE ACCESSION NUMBER: Contig50470
caacttgccatcgtttcatgataacaaccatttataagagaaaaagacaggacacgctttccatcgttcagtatttgatgacacaaaattccagttctaatgttgggcatcaacttctagcactacgagtgtggctcccacttggacaagataccgagcttcgttatgcagtttttaatattatttattattttaaaaagtaataagcacaaaactacatacattgtatgtcatttaaagtatttatgtcaaacagggtgcaagtgtgaacccaaggactggagcacaaattcctaactgcctggggcagggctaatgttagcattggtgtgcgtctgcctccaaaggaggttctagttgtcagcgagactcaacacagatgacattgaaattcgtttctctcctcatctatcacactggagcaaaactggctatttctgtgaatgatataaaacagggttctctgtaatggtattgtacatagtatatgtttactgttaagttcttgttatattataataaatatatttatagatcta

SEQ ID NO: 361 - DNA, 633 bp, Homo sapiens
  ref <308>: DATABASE ACCESSION NUMBER: Contig50661
aaaacaaataggagttcagggaagagaaacatccttcaaaggacagtgttgttttgaccgggagatctagagagtgctcagaattagggcctggcatttggaatcacaggatttatcatcacagaaacaactgttttaagattagttccatcactctcatcctgtatttttataagaaacacaagagtgcataccagaattgaatataccatatgggattggagaaagacaaatgtggaagaaatcatagagctggagactacttttgtgctttacaaaactgtgaaggattgtggtcacctggaacaggtctccaatctatgttagcactatgtggctcagcctctgttaccccttggattatatatcaacctgtaaacatgtgcctgtaacttacttccaaaaacaaaatcatacttattagaagaaaattctgattttatagaaaaaaaatagagcaaggagaatataacatgtttgcaaagtcatgtgttttctttctcaatgagggaaaaacaattttattacctgcttaatggtccacctggaactaaaagggatactattttctaacaaggtatatctagtaggggagaaagccaccacaataaatatatttgttaatagtttttc

SEQ ID NO: 362 - DNA, 439 bp, Homo sapiens
  ref <308>: DATABASE ACCESSION NUMBER: Contig50841
tttgcatttcaagaagatgattcttttgagaaagagaatagatcttgggaatcttccccattttctagtccagaaacttcaaggtttggacatcacatttcacagtcagaaggacagcgaactaaagaagaaatggtcaacacaaaagctgttgaccaaggtatcagcaacacaagccttctaaactcaaggatttaaactcaacttaaggttgagctttaaacttccaaaacttcttcctggatgataaattattcttagaaactgatttggactgttaaaggctaaaagtagatgtatttaaagactcttcttgacacattttgcctacacttgctatgtaaatatgtatgcctgtcatttttgtttcctttgttcctttttacgtttatactctgttcttctgtacatagagcttaaaataaacattctttttgaa

SEQ ID NO: 363 - DNA, 817 bp, Homo sapiens
  ref <308>: DATABASE ACCESSION NUMBER: Contig50900
gtgtattcctgtgggcactggtgtcttctctcttctttcatgtccctgctggattactggccctcttcaccctcagacatcacaaatatggtgcagctattgctggagtttaccgagcagcagggaaggaaatgataccatttgaagccctcacactgggcactggacagacattttgcgtcttggtggtctcctttttacggattttagctactctatagcatacatccttatgctgagatgttgaacttaaactttatggaatcctccaaaagaatacattatggagtgtagtgttttcttagttcttcaaagggaagcaacttggatgaacaggaacatgaaggacaacacatctcagccttttcttcattttgaagctcctagaattgaagacttatgtggactcctattgttctcaaccaaaacaagtcttttggctttcttttttgtagatatttaatttaagcagttttcatgtgtacctttacccaagccaagtcaacagtgtctctggggtggcatcctttgcactgaaatttacagtattctgtgagatgtcgcatattttgaagaaaccgtggaagatactggtttatttcaaatgagcagagtatgttgtattaaaatcttatctaatcttgattaaaatttggcaaactcttttctttgctacatcttagtgacaataaatgccaaataggttttggttgagtatagttttgaaaacaaatttggtgaaataaagcaggaaaaaaaatttaagtataactcaagtagtggctttggttccactgtttataaataaaaagtagat

SEQ ID NO: 364 - DNA, 582 bp, Homo sapiens
  ref <308>: DATABASE ACCESSION NUMBER: Contig51456
aaaggatctcagacccgctcttccttttcccttcattcccttgagagtcagccatgaacggaatacctgctaggttccaggaatgagctcacctaacagatagcaaatgtgtctggttagatctcagcagagcccattctgcaagacctggctgagccagatgagagggtgggccctgtgctggggggccttgggtcacacacaggaaccgagacctggcttccaccccccagtcacccacttgggttatctgctggaagttatcgataggactgtgtggccaaccaagtgcttgtgagatcactgacactgcaaaaacaaagcaaactgctccgggtaccaggacttcctccaacctggcaagggtgtgcgctgaggcggggcttgcaggtgagggggctgtatgcttcaggaactaactaaatgcatgcagaaggtaagaggcatgatgggaggtgttcaagcacagcaatcccatttgggagttattttgatactgcgatgagtaagggtaagggcgcatggaatggggctaaggtgggagtgaacactggggtgaataaattttaaatcaattcaagt

SEQ ID NO: 365 - DNA, 497 bp, Homo sapiens
  ref <308>: DATABASE ACCESSION NUMBER: Contig51710
ctctctgctgtgcgtctgtgcagttcttgttcttccctggaggactcttggatcgcctgtgatcttggccaggagaccaggtgcctgggtcccttcctggaaggggacaagttacacaccccagccccattttcccaccaacttctacatgccttgggagaacctgctacatgttggctgcccccttcccctatttcagcagtgcccagtcctgcttataaacctgaggcctgctccccataccctgccctgtgcaagtgccagccgttattccaggcagcccaatgttgttgaggccagatggattcctggaagcagctggcccatggatgtgagtcatcacagtattctagaaacagagaagaggtcttaacctaatgcgcatagagaaattgttctcattgtaaacatacccctgtccttagctgatctaggtggaagcccagcttcatgtgctagggggcatgataatgataataaaggaattgtatctagga

SEQ ID NO: 366 - DNA, 430 bp, Homo sapiens
  ref <308>: DATABASE ACCESSION NUMBER: Contig52193
tatacctactcatttttgtgggaatggttaagcagtttaaataattcctgttgtatatgtctattcacattgggtcttacagaaccatctggcttcattcttcttggacttgatcctgctgattcttgcatttccacattaaggtggctctcaaacccaaaacacagatcaatataagattttaggaggtggggtgaggcacaattatgaagtgcatattattcagatgtatagtaaatactttgcattgcttttataaagggttctttaaggattttttaagatttttacacttccaaagtacatttactttttgtcttgataatgaatcacttttgccagtaattggcctcttccaaaagtgatccttctgacttacagatgtttaaaatgtgccatgagtttaactacatcttgatacaaacatgat

SEQ ID NO: 367 - DNA, 747 bp, Homo sapiens
  ref <308>: DATABASE ACCESSION NUMBER: Contig52419
agcagttccatcatgtgaagtaccctcttctgctctgagtggaactgtggtagagctacgatgtcaagacaaagaagggaatccagctcctgaatacacatggtttaaggatggcatccgtttgctagaaaatcccagacttggctcccaaagcaccaacagctcatacacaatgaatacaaaaactggaactctgcaatttaatactgtttccaaactggacactggagaatattcctgtgaagcccgcaattctgttggatatcgcaggtgtcctgggaaacgaatgcaagtagatgatctcaacataagtggcatcatagcagccgtagtagttgtggccttagtgatttccgtttgtggccttggtgtatgctatgctcagaggaaaggctacttttcaaaagaaacctccttccagaagagtaattcttcatctaaagccacgacaatgagtgaaaatgatttcaagcacacaaaatcctttataatttaaagactccactttagagatacaccaaagccaccgttgttacacaagttattaaactattataaaactctgctttgtccgacatttgcaaagaggtacacgaggaaatggaattggtatttcattttaattttcatgactactaactcacctgaacttgctattttaaacaaatagttctgtcgacacctaaaatataatctggcttcttgtgtctggactaagttaaaagaattaaaatactttgtaatgtc

SEQ ID NO: 368 - DNA, 518 bp, Homo sapiens
  ref <308>: DATABASE ACCESSION NUMBER: Contig52543
tacaggacccagaaggctgtctccgtgtacaggaccagtaaccaggcttacgggagcagagcccccaccgtgcacgagatgcctaaagtattttatccaaattcgaataaattttcccaacaacttgcagcgggtggaatgttccggaacaatactctcaatgtttacctggagaaaagcatcgtgactggccccgataactgcatcacctcctgtgaccggctcaacttccaccccagttacaacatcaacaggccatccatctgcgattgaggggctggaaactccctctaggagtcctctgaccccagggcctcctggaaaatcatcatccctcatcacccacagtcgcccgattgtgacggcacagactgcgctgccttccctgaaaatattattcgtctgcggagtaggaaaatatgcaaacggggccgtgaagtcctgccatttcacatctaataagtacatgggaaagatgctaatggttgactttgcattaaaaacgttgtcacatcctg

SEQ ID NO: 369 - DNA, 559 bp, Homo sapiens
  ref <308>: DATABASE ACCESSION NUMBER: Contig53180
agttcacgtagcaggtctaggcaaagactgggcaattgagcagaggagacggacctgtgagtctgaccacgaggcggaccccttcaccttggctgggcctggtcctggtccttaggttttgtcaggttgtccttgtttggatccctcaactaggtgataagcactggagggggatgacccgccttggacgtgtttctttaacctcatccatataatagggccgtgggatggttgtagaggtaaagcaggatgatggtgttttaagaccagagcttgggaccagggctcctacacctaattttctctcctggtagctgaacaaaggtctaaattagcttaacaaaagaacaggctgccgtcagccagagttctgaaggccatgctttcagtttcccttgttgacaattgctctccagttcctatgaaagcacagagccttagggggcctggccacagaacacaaccatcttaggcctgagctgtgaacagcagggggttgtgtgtctgttctgtttctctgcttgccgaactttctcaataaaccctatttcttatttat

SEQ ID NO: 370 - DNA, 714 bp, Homo sapiens
  ref <308>: DATABASE ACCESSION NUMBER: Contig54096
attatgcacatcataattttgcatcatgcatgcatgaaaacaataacaaacctttttcatttaaaaaaagaccaatgtcattcattcacagccaagtttctgttctagacatatttctagtgttcttgtgggtctagctaagggagggtccagggttaatgaaatatccctgatttttcgttaacaaaacctttgtggactcaggtggagagacttatccaagaacgtggctgggagttcatgtggaatgagcgtttgggatacatcttgacctgtccatctaacctgggcactggacttcgggcaggagtgcacatcaaactgcccctgctaagcaaagatagccgcttcccaaagatcctggagaacctaagactccaaaaacgtggtactggaggagtggacactgctgctacaggcggtgtctttgatatttctaatttggaccgactaggcaaatcagaggtggagctggtgcaactggtcatcgatggagtaaactatttgattgattgtgaacggcgtctggagagaggccaggatatccgcatccccacacctgtcatccacaccaagcattaactccccatcgccagctgatgactcaagattcccaggagttttgctcattctaatgatggcccattctacttgctctggacctgcccccgcatcccctgcctccatcctagtaaagactccttgctatgctgc

SEQ ID NO: 371 - DNA, 648 bp, Homo sapiens
  ref <308>: DATABASE ACCESSION NUMBER: Contig54666
agaggtagggcgccgccgtgacagattagtcctaaagggaacggggttgttagttcaattggctaccggaaaaaaccaggctgggctgggcgccgcatgacaaccgataccggaaaaggcgggtcgttccccccggacagccctacgccggcaaaggtctcgagatgcaggcggccctagaggtcaccgctcgctactgtggccgggagctggagcagtatggccagtgtgtggcggccaagccggaatcctggcagcgggactgtcactaccttaagatgagcattgcccagtgcacatcctcccacccaatcatccgccagatccgccaggcctgtgctcagccttttgaggccttcgaggagtgtcttcgacagaacgaggcagctgtgggcaactgtgcagagcatatgcgccgcttcctgcagtgcgctgagcaggtgcagccgccacgctcacctgcaactgtggaggcacagccacttcctgcctcctgaggactcctctgacggcaggaaaactggacatgaatgactgcccccccgcccctcccctgcagagtggccagatggagtcctgagccctggacatgggcccggctttcctggatatcaggacttccaataaataaagactctgtatactggg

SEQ ID NO: 372 - DNA, 1025 bp, Homo sapiens
  ref <308>: DATABASE ACCESSION NUMBER: Contig54895
gcggacagctgaagtgtggatggatgaatacaagcaatactattacgctgcccggccattcgccctggagaggcccttcgggaatgttgagagcagattggacctgaggaagaatctgcgctgccagagcttcaagtggtacctggagaatatctaccctgaactcagcatccccaaggagtcctccatccagaagggcaatatccgacagagacagaagtgcctggaatctcaaaggcagaacaaccaagaaaccccaaacctaaagttgagcccctgtgccaaggtcaaaggcgaagatgcaaagtcccaggtatgggccttcacatacacccagaagatcctccaggaggagctgtgcctgtcagtcatcaccttgttccctggcgccccagtggttcttgtcctttgcaagaatggagatgaccgacagcaatggaccaaaactggttcccacatcgagcacatagcatcccacctctgcctcgatacagatatgttcggtgatggcaccgagaacggcaaggaaatcgtcgtcaacccatgtgagtcctcactcatgagccagcactgggacatggtgagctcttgaggacccctgccagaagcagcaagggccatggggtggtgcttccctggaccagaacagactggaaactgggcagcaagcagcctgcaaccacctcagacatcctggactgggaggtggaggcagagccccccaggacaggagcaactgtctcagggaggacagaggaaaacatcacaagccaatggggctcaaagacaaatcccacatgttctcaaggccgttaagttccagtcctggccagtcattccctgattggtatctggagacagaaacctaatgggaagtgtttattgttccttttcctacaaaggaagcagtctctggaggccagaaagaaaagccttctttttcactaggccaggactacattgagagatgaagaatggaggttgtttccaaaagaaataaagagaaacttagaagttgtctctgg

SEQ ID NO: 373 - DNA, 1469 bp, Homo sapiens
  ref <308>: DATABASE ACCESSION NUMBER: Contig54926
attggctgagcagctactccatgctgggcaccgtcctgggcactggaagtacagcagagaacgaaaccaagaccacaccctccagaagcctgcattccagcaggacagacagacttccatacacagagcaggaaaatgcacagcgtgtcagatgatgatgattactatgagaaaaataaagcaggcaaagagaacaggactatttggatgagggtggtgcaaattcaaataatcagacagcctttgctgggaaggtgatatctgagcaaagattcgagaaggtggggagagccccggagccttccccgcagagcagaggaggcccgggaagctctggactcatagcggttcagcacggccacgacacggccacttccagacagagcccctggctgctgggtagggaccgcagcacctcagagaaccctttctggggtcacttctggcaccctctgcaaacctcaagggggagcgtgaggctgggggctgtccatcagggtccaggcacctcctgaaggaacctctcaaagccagccgatcaccggctccagacccacgctgtcagacatctctgtggccaccagaccactgccactctcacgggtgtgatgacatgggacctgcctactggtagtcttctgccttcgtggaattctgcaacttccttcctgcctcggccacagcatgtcagccaagcacctgtcagggtccctccctggcaggacgatgtttagaagctcaacaccgtgctcctgcctcctcttcagacccatcagaacttgctaccatgggtgtgttttaataaataacttcatttctgcagcaaataaataaataaataaatgtagttgcaatattgcctttaaaagcacttttaagcatcaattgtgaaataaaaagcccgagcaaaagccctctttgagcgtgaagtgtctaaacgtttatttgtactactattgttgtaaagggtagattttgtagcattttgaggtggtgattcaactgcattaacagcatcccgagaccgcctgccacgatctggaggaaacgcacggccagggcccacgtgcagggtagggtcctgccaggctcccaaaatgccccgtcccagcactcagtcccatggaggcagcacagcctcagggaggccagcgactctgggcctgcgggtgagtccttcagcccctgcacagcccaatccatctgccacccacttggtgaccccaaattgtagtaagtcaacacttccagttactcaacagcttctgaaatttaaatctctggaacaatttacagtaataagaccctaggtgcacctgtctactatccttgtcctccctaatgaaatgggctaggcgtggtggctcatgcctgtaatctcccattttgggaggccaaggcaggagaactgcttgagcccaggtgttgggagaccagcctgggtaacatggcgagacctcacatctaat

SEQ ID NO: 374 - DNA, 684 bp, Homo sapiens
  ref <308>: DATABASE ACCESSION NUMBER: Contig54956
ccttgggggatcctgggtgaggagtgttgccccatccagagaatgaatgagttcctttaagtgccaccgccagcaagcccagaggcacacagtccgagtgcacccacttagcctttacattcctctccaccgacaaaaggaaggggaaactcaatcagcaggacttcagaaagggccttgtgtttatagctttgtcaagtaaatttggacgcagctggagcacaggccctgtttgtttgcacataataatcttgtttatcactttaaaaaattcagtaatatctcagcagtcaggcttctggttgtgaaatcacattgtatgggatttataccaaattatgtatttgctaaacattcactgcacacgtgtacagcggagtacgaaaaggaacgttgtccacaggggatttatggatacaacagcaaacattttataaactatgcacatgcattacacacatgcacacacatatgcacacacatgtgcaaacatagccacttttttgtcaagagttaccctttggggctccttaaaccagaatgggagtttgaaagagagatcatactccagctgaagtttgttgacccttttctaaaattaaaaagatcaaatttagtatttgctggatatgcagggagatgagactcttttaatctcaaaataaacagattctttcaagaacg

SEQ ID NO: 375 - DNA, 515 bp, Homo sapiens
  ref <308>: DATABASE ACCESSION NUMBER: Contig54993
cgaactttccatgggaaactttcccttttgtaagttgagggccaggggtagggatattttttagtttgtgattttacatttatctgtacatactttttcaagattgatcatttttataaccatggttttcctgaaatcctcaattcatcaatatgaaggaaatgaaccacatagactttatgcaataaataacagtgcaagtgagtataactctaactgatgttccacaaaacatttttgatttcaggtttgtatgatgtagtttttaatcgtacattttcatatgcttcaaactaacacatttttaaagctttcccccacttttctctctatttgtattgttagccatcttgaagtgatgttgtttaacataaattgtactgttgaatttggctttacgggtgtaaacactgatggtatatcagtatctgagaccccaaactctccaaatactgatggtgcattttattcttgaagtgaaatctgtgcaataaaataacagactgtctgcaaaa

SEQ ID NO: 376 - DNA, 788 bp, Homo sapiens
  ref <308>: DATABASE ACCESSION NUMBER: Contig55725
tactagttgaaatttttaatagaatcaaggcacaaaagtcttaaaaccatgtggaaaaattaggtaattattgcagattgatgtctctcaatcccatgtattgcgcttatgttacaagttgttgtcacagttgagacttaatttctcctaatttcttctgcccgaagggtaagtggtgcgtccagcttacacgatcataattcaaaggttggtgggcaatgtaatacttaattaaaataatgatggaagagctatctggagattatgagtaagctgatttgaattttcagtataaaactttagtataattgtagtttgcaaagtttatttcagttcacatgtaaggtattgcaaataaattcttggacaattttgtatggaaacttgatattaaaaactagtctgtggttctttgcagtttcttgtaaatttataaaccaggcacaaggttcaagtttagattttaagcacttttataacaatgataagtgcctttttggagatgtaacttttagcagtttgttaacctgacatctctgccagtctagtttctgggcaggtttcctgtgtcagtattccccctcctctttgcattaatcaaggtatttggtagaggtggaatctaagtgtttgtatgtccaatttacttgcatatgtaaaccattgctgtgccattcaatgtttgatgcataattggaccttgaatcgataagtgtaaatacagcttttgatctgtaatgcttttatacaaaagtttattttaataataaaatgtttgttctaacttg

SEQ ID NO: 377 - DNA, 652 bp, Homo sapiens
  ref <308>: DATABASE ACCESSION NUMBER: Contig55883
aattttgaccctggccatttgtactacagaagtgattatgggattaaaagaatacataattacagtgttttgggattgggctcttttttttcttaatagaaaagcagaaacttcataaataatagctgtgctttagataccagataacaaatattgtttcccctgaagatatgacctactagaactactcacatatatagtccaataattactgacttaataggtatggtaaaatagctgataataagtcagactctcaagagtttctgtaccttgattattgacaaattcattgttttacatcctactaaagaacatgtgtgtggggagggggtggggaactggttcacaacataatctgaaggagatcaaacatctgtaaggacaggtacccagtgatgataatatatctgaaaacacaagccatttttattctttatcccaattaacttgaggtactctaatgatgaagcactcgattgcactatgacctccttgagtgatgtgcagcttggttcctctctcactttttgtttctttttaatatgcaaatgtgagtgtgcgatcttcagtgtgtctgcataagctaacttaagatgaatttaagtacagttttctgaaatatttctattgaaataaattacttaaaatt

SEQ ID NO: 378 - DNA, 507 bp, Homo sapiens
  ref <308>: DATABASE ACCESSION NUMBER: Contig55997
aggtttttctgcctgaagaagcgtcatacggaccggattgttttcgctggcccagtgtccccggagcttgtgtgcgatacagagagcacctcggaagctgaggcagctggtacttgacagagaggatggcgctgtcgaccatagtctcccagaggaagcagataaagcggaaggctccccgtggctttctaaagcgagtcttcaagcgaaagaagcctcaacttcgtctggagaaaagtggtgacttattggtccatctgaactgtttactgtttgttcatcgattagcagaagagtccaggacaaacgcttgtgcgagtaaatgtagagtcattaacaaggagcatgtactggccgcagcaaaggtaattctaaagaagagcagaggttagaagtcaaagaacatattcttgaaagttatgatgcattcttttgggtggtaacagatcataaagacattttttacacatcagttaatatgggattattaaatattggctataagtg

SEQ ID NO: 379 - DNA, 844 bp, Homo sapiens
  ref <308>: DATABASE ACCESSION NUMBER: Contig56298
tctctctctcctgtctcggctgttgtgggttgcaggttgggtgctgctgttgtggtccttcccagaaactgccagtagagggcagcctgggcatcctaatgcttactctggttgttacacaaagaaaatattggggtcactggcgagcccacccacactcaccagaatctccactgtagtccccctaacaaacagcccttcacttcctctcccacttcagcaatttgtattttgatgccattggcctcagatcagagtgttttaaatcatcacgccctggcttatccctggtcgagccaggacacggggtgcttcagtgggtctgtcaccctctctccttgaagcatgttgcttttatttatttacttttactctcaccctgctcctgtaccagcaggggccacttcaaagccaaggtacagggtgataacttgtggtccagcatcagttttctccacttctttctcccactcacccccagcaaggtgcctggggagacttgagcagatgtttcattttggcctggccagtggctgaaagccaggcctccaatgcactgtgacctctggcttccccagcagctttcccagagaggcagaggggccttccacagcccgggttctcctgctgcctcctgcctgctgcagctgcaggcattctgaggggcaacgtggaggaagggccagggatgcatgggattttaattgtttcatcacaccttccccgtggcaaagaaacagtcagtcctcttcaggtgtcttctggatttctggtgatggacagagaaatctttttacagtttcaaattatgttcaacaaataaaaattgcattttttattttga

SEQ ID NO: 380 - DNA, 571 bp, Homo sapiens
  ref <308>: DATABASE ACCESSION NUMBER: Contig56843
ggaaatgaagattctaagagctttaaactttggtctgggtcggcctctacctttgcacttccttcggagagcatctaagattggagaggttgatgtcgagcaacatactttagccaaatacctgatggaactaactatgttggactatgacatggtgcactttcctccttctcaaattgcagcaggagctttttgcttagcactgaaaattctggataatggtgaatggacaccaactctacaacattacctgtcatatactgaagaatctcttcttccagttatgcagcacctggctaagaatgtagtcatggtaaatcaaggacttacaaagcacatgactgtcaagaacaagtatgccacatcgaagcatgctaagatcagcactctaccacagctgaattctgcactagttcaagatttagccaaggctgtggcaaaggtgtaacttgtaaacttgagttggagtactatatttacaaataaaattggcaccatgtgccatctgtacatattactgttgcatttacttttaataaagcttgtggccccttttacttttttatagctt

SEQ ID NO: 381 - DNA, 1089 bp, Homo sapiens
  ref <308>: DATABASE ACCESSION NUMBER: Contig56852
gatattcaggccaattcagttttggtgtcctggaaagcaagttctaaaattctcaaatctagtgttaaatggacagcctttgtcaagactgaaaattctcatgctgcgcaaagtgctcgaataccatctgatgtcaaggtatataatcttactcatctgaatccatcaactgagtataaaatttgtattgatattcccaccatctatcagaaaaacagaaaaaaatgtgtaaatgtcaccaccaaaggtttgcaccctgatcaaaaagagtatgaaaagaataataccacaacacttatggcctgtcttggaggccttctggggattattggtgtgatatgtcttatcagctgcctctctccagaaatgaactgtgatggtggacacagctatgtgaggaattacttacagaaaccaacctttgcattaggtgagctttatcctcctctgataaatctctgggaagcaggaaaagaaaaaagtacatcactgaaagtaaaagcaactgttataggtttaccaacaaatatgtcctaaaaaccaccaaggaaacctactccaaaaatgaacaaaaaaaaaaaaagcgaaagactgcagttgtgctaaaaacaaaacaaaacaaacaaacaaacaaaaaagtaaaaaaagattactttcgagagagaagtttaagcttcaccaatgctgctcctgaccaatggaaatatgtacaacttcagcattttaagtaactggcttcaaggggtactgtggcaaccaaataaaataactccattttctaaaactttcatgtaacttttatgtctggactacagttcaagtggacaaaaacatttctgtattttttttaagtaaataagagtagttgaactgagcaatacctcctcctgtgttgtattacacatattagccacgagtttttgcagtgaccagataaacttgaattgacacgtggtgtaataaaatggacaaattctgtagagtagacacagtgagtatgtggacctcttttataaggaaaaatacattttggattaaaatcaattgcttctgtcttgttttgtttctaaataaagaataatttctggg

SEQ ID NO: 382 - DNA, 1118 bp, Homo sapiens
  ref <308>: DATABASE ACCESSION NUMBER: Contig57584
agctgttgtgcatccagaggtggaattggggcccggcattccctcctcgtcccgggctggcccttgcccccaccctgcaactcctggttgagatgggctcagccaagagcgtcccagtcacaccagcgcggcctccgccgacaacaagcatctggctcgagtggcggacccccgttcacctagtgctggcatcctgcgcactcccatccaggtggagagctctccacagccaggcctaccagcaggggagcaactggagggtcttaaacatgcccaggactcagatccccgctctcctactcttggtattgcacggacacctatgaagaccagcagtggagaccccccaagcccactggtgaaacagctgagtgaagtatttgaaactgaagactctaaatcaaatcttcccccagagcctgttctgcccccagaggcacctttatcttctgaattggacttgcctctgggtacccagttatctgttgaggaacagatgccaccttggaaccagactgagttcccctccaaacaggtgttttccaaggaggaagcaagacagcccacagaaacccctgtggccagccagagctccgacaagccctcaagggaccctgagactcccagatcttcaggttctatgcgcaatagatggaaaccaaacagcagcaaggtactagggagatcccccctcaccatcctgcaggatgacaactcccctggcaccctgacactacgacagggtaagcggccttcacccctaagtgaaaatgttagtgaactaaaggaaggagccattcttggaactggacgacttctgaaaactggaggacgagcatgggagcaaggccaggaccatgacaaggaaaatcagcactttcccttggtggagagctaggccctgcatggccccagcaatgcagtcacccagggcctggtgatatctgtgtcctctcaccccttctttcccagggatactgaggaatggcttgttttcttagactcctcctcagctaccaaactgggactcacagctttattgggctttctttgtgtcttgtgtgtttcttttatattaaaggaagtaattttaaatgttactttaaaaaggtatatgt

SEQ ID NO: 383 - DNA, 1211 bp, Homo sapiens
  ref <308>: DATABASE ACCESSION NUMBER: Contig57803
ttattctaaagagcccagtaaggaagacagaaaatcatttgaacaactggtaaaccttcagaaaacccttttggagaaagctagtcaagagggccgatcactccgaaataaaggcagtgttctcatcccaggccttgtggagggatctaccaaaaggaagcgggttctgagtccagaagagctggaggacagacagaagaaaagacaagaagcagctgccaagagaaggagactcatagaggagaagaagaggcaaaaggaagaggctgaacataagaaaaagatggcctggtgggaatccaacaattaccagtccttctgcctgccctctgaggagagcgagccagaggaccttgagaatggggaagagagctctgctgagctggattaccaagacccagatgctacttccctcaagtacgttagtggtgatgtcacccaccctcaggctggggccgaggatgctctcattgtgcactgcgtagatgactctggccactggggcagaggtggtttatttacagctctggaaaagcgatccgctgagccaagaaaaatatatgagctggctgggaaaatgaaagacctgagtttgggaggtgtccttttatttcctgttgatgataaagaatcaagaaacaaagggcaagatttgttggccttgattgtggctcagcatcgtgatcgttccaatgtcctgtctggcattaagatggcagccctagaagagggcctgaagaagatatttttagcagcaaaaaagaagaaagcaagtgttcatcttccacgtattggacatgccacgaaaggttttaactggtatggtactgagcgacttattcggaaacatctggctgcaagaggcatcccaacttacatatattattttcctagaagcaagtctgctgtccttcattcacagtcttcatcttcctcctcaagacagctggtgccttaagaattggcccagcctcagatcctgtctttagcaaccagctaatatttacccagaggtactgcaatagagtatttcaaaatggaatcaggatctggtgggcctcagaaattgtctcttttctgagtttcagtttggttctcctggatgttttgctctgttttggtacctgtaatatagggaaacacaactttttttgggaaagccctttgaccccagcttgctagttgcataataataaattttctgttcctaa

SEQ ID NO: 384 - DNA, 1510 bp, Homo sapiens
  ref <308>: DATABASE ACCESSION NUMBER: Contig58260
aagaatgggagtggcaatgctatcatcatcgtggtcgggggtgcggctgagtctctgagctccatgcctggcaagaatgcagtcaccctgcggaaccgcaagggctttgtgaaactggccctgcgtcatggagctgacctggttcccatctactcctttggagagaatgaagtgtacaagcaggtgatcttcgaggagggctcctggggccgatgggtccagaagaagttccagaaatacattggtttcgccccatgcatcttccatggtcgaggcctcttctcctccgacacctgggggctggtgccctactccaagcccatcaccactgttgtgggagagcccatcaccatccccaagctggagcacccaacccagcaagacatcgacctgtaccacaccatgtacatggaggccctggtgaagctcttcgacaagcacaagaccaagttcggcctcccggagactgaggtcctggaggtgaactgagccagccttcggggccaattccctggaggaaccagctgcaaatcacttttttgctctgtaaatttggaagtgtcatgggtgtctgtgggttatttaaaagaaattataacaattttgctaaaccattacaatgttaggtcttttttaagaaggaaaaagtcagtatttcaagttctttcacttccagcttgccctgttctaggtggtggctaaatctgggcctaatctgggtggctcagctaacctctcttcttcccttcctgaagtgacaaaggaaactcagtcttcttggggaagaaggattgccattagtgacttggaccagttagatgattcactttttgcccctagggatgagaggcgaaacacttctcatacaagcccctttattgccactaccccacgctcgtctagtcctgaaactgcaggaccagtttctctgccaaggggaggagttggagagcacagttgccccgttgtgtgagggcagtagtaggcatctggaatgctccagtttgatctcccttctgccacccctacctcacccctagtcactcatatcggagcctggactggcctccaggatgaggatgggggtggcaatgacaccctgcaggggaaaggactgccccccatgcaccattgcagggaggatgccgccaccatgagctaggtggagtaactggtttttcttgggtggctgatgacatggatgcagcacagactcagccttggcctggagcacatgcttactggtggcctcagtttaccttccccagatcctagattctggatgtgaggaagagatccctcttcagaaggggcctggccttctgagcagcagattagttccaaagcaggtggcccccgaacccaagcctcacttttctgtgccttcctgagggggttgggccggggaggaaacccaaccctctcctgtgtgttctgttatctcttgatgagatcattgcaccatgtcagacttttgtatatgccttgaaaataaatgaaagtgagaatc

SEQ ID NO: 385 - DNA, 443 bp, Homo sapiens
  ref <308>: DATABASE ACCESSION NUMBER: Contig59294
cctcgataaacagggccgtgccgcagatgcccaccggaatggagaaggaagaggagtcggaacatcatcttcagcgggctatttcagcacagcaggtgtatggcgagaagagggataatatggttataccggtcccagaggcagaaagtaatattgcttactatgagtctatatatcctggggaatttaagatgccaaagcagctcattcacatacagccttttagtttggatgctgaacagcctgattatgatttggattctgaagatgaagtatttgtgaataaactgaaaaagaaaatggacatctgcccattgcaatttgaggagatgattgaccgcctagaaaaaggcagtggtcagcagccagtcagtctgcaggaagccaaactactgctaaaagaagatgatgaactaattagagaagtttatgaatattggatt

SEQ ID NO: 386 - DNA, 370 bp, Homo sapiens
  ref <308>: DATABASE ACCESSION NUMBER: Contig59870
gtccgcctgattaagggtcttcttttacttttgcggggggaggggggaggagtggggagggagggaatgtgggaggaattaagacaaatatttcagactggtgtaaaggacaaatatgacaacgacgtcaaggactcgcatccgtcgctttctgcagaaaggggcttcttcggtcccgagctcgcgtccaggtggccaggcctctgccggcggctccagtggctgcgattatcgggttcggtaaatgcccccacgtgcttgtgtctctttccccccttttctgtatatagagtggtttcagattgtaaatagcgcgtcagcgaacttgtctaaatcatatatttttgtctaataaactaaatgaaatgac

SEQ ID NO: 387 - DNA, 859 bp, Homo sapiens
  ref <308>: DATABASE ACCESSION NUMBER: Contig63649
gtcgcagggtaccagtgtgcggagttcctgttgccaagctgaaggtggccctgggcaggcacaggtgtggtcatatcttcagccaacaggaccatcctccggagggccacctctggggacttcctacgggaagagagtgacagatttggtgcttctgtgtgtttctgccgcttcagtggggccgctgcgggagacagcgggtggatcctccagcagcctgtctgctgagcctgccttctcaagtctactgttaaaatcaggaccgggtcgtgtccgagcctacaggccctgtctccgctccccaggcctgcaggagttgagggctgcacctgctcgctggagagggagaggcagatttagtggacgcctggcatggactcggactggcctttggaagctccctgccctgacgggttgcctgtcaccactgcgaagtgaggcttggaggacctgcacctgagaaaggctgtgtgtggtcttgggtccacacctgccagagctaacttactgccagacggcgacttactgtgggccaccctcagtgaaccggggtgtcctcagctggccctacagagcacttctgtgctggggatgagtaggaactctgggcgaggagggtcccagcgccgcccctcgatacagccctgctctgccctctgcccgtacttataccaggtgggatccctgccctgcattgcctggggattggctgggcttgggcacgccctgctgtggaactggatgttttcagggagcccagcctttcctcatgtcaacacagttcacaatatagttttcaaagtacagtttaaaactcaaaagtaaacttttcagcaactcaaaaaaaaaaaaaaaaaaa

SEQ ID NO: 388 - DNA, 60 bp, Homo sapiens
  ref <308>: DATABASE ACCESSION NUMBER: AB007913
atcacctttactttgtactctgtgtgtatgttttggttttctgtgttttaataaatcctt

SEQ ID NO: 389 - DNA, 60 bp, Homo sapiens
  ref <308>: DATABASE ACCESSION NUMBER: AB024704
aatgagatgtaactcatgaatgtctcgattagactccatgtagttacttcctttaaacca

SEQ ID NO: 390 - DNA, 60 bp, Homo sapiens
  ref <308>: DATABASE ACCESSION NUMBER: AB029000
taggtttttaaataccagctaaaggattacctcactgagtcatcagtaccctcctattca

SEQ ID NO: 391 - DNA, 60 bp, Homo sapiens
  ref <308>: DATABASE ACCESSION NUMBER: AB033006
ctgtttgaaagctggtagaattcatccctcttactgtagataacactgcaaatcttggaa

SEQ ID NO: 392 - DNA, 60 bp, Homo sapiens
  ref <308>: DATABASE ACCESSION NUMBER: AB033025
catatgtttcacagtacaggatctgtacataaaagtttctttcctaaaccattcaccaag

SEQ ID NO: 393 - DNA, 60 bp, Homo sapiens
  ref <308>: DATABASE ACCESSION NUMBER: AB033058
ccttcatctctaacagaggaagaactgtattatcaaaccttatggtctacccatgaataa

SEQ ID NO: 394 - DNA, 60 bp, Homo sapiens
  ref <308>: DATABASE ACCESSION NUMBER: AB033090
atggcagtcctaaatgttcatgagacagattgtattaatttaaccaggactatgtagaag

SEQ ID NO: 395 - DNA, 60 bp, Homo sapiens
  ref <308>: DATABASE ACCESSION NUMBER: AB033117
ctgaggttattactggccgtaaggcagagttaatccatacagaaaccagtgtgtccatgt

SEQ ID NO: 396 - DNA, 60 bp, Homo sapiens
  ref <308>: DATABASE ACCESSION NUMBER: AB037734
acctccttgtgctatttgaatgctaaggtattagttgcaataggcttacgccttcgctcc

SEQ ID NO: 397 - DNA, 60 bp, Homo sapiens
  ref <308>: DATABASE ACCESSION NUMBER: AB037805
tcagaaccttttgttgtcaactgtcactgtttcttccaaaagtcacaatttgtacaagaa

SEQ ID NO: 398 - DNA, 60 bp, Homo sapiens
  ref <308>: DATABASE ACCESSION NUMBER: AB040912
tttgtgcaaaggtaaacgcagattgtatcttttttaatggtacggcataaaaagtaaccc

SEQ ID NO: 399 - DNA, 60 bp, Homo sapiens
  ref <308>: DATABASE ACCESSION NUMBER: AF007872
gtcagcttgatgatcttaaatgatggaagtataggacgttgcttattttaaaacaaggga

SEQ ID NO: 400 - DNA, 60 bp, Homo sapiens
  ref <308>: DATABASE ACCESSION NUMBER: AF016495
tatgtacacctctggacaaaatgttcctcaatcttaagatacaaagaccctcattgtctg

SEQ ID NO: 401 - DNA, 60 bp, Homo sapiens
  ref <308>: DATABASE ACCESSION NUMBER: AF025441
agaagatagtgctaacgcacaatcgcttaaaatcactaatgaagattctgagtgaagtga

SEQ ID NO: 402 - DNA, 60 bp, Homo sapiens
  ref <308>: DATABASE ACCESSION NUMBER: AF052117
gggaaacattaagcagaccctattttcactggcgcggtaataactatttatttgctatcc

SEQ ID NO: 403 - DNA, 60 bp, Homo sapiens
  ref <308>: DATABASE ACCESSION NUMBER: AF052162
cagtaagtacgggaaaaaatgtttactaacttcctcagagattcgtgatacgcgtttctc

SEQ ID NO: 404 - DNA, 60 bp, Homo sapiens
  ref <308>: DATABASE ACCESSION NUMBER: AF064200
tactaagcttaactacatgtcacacattgtacatggaaacaagaacattaagaagtccac

SEQ ID NO: 405 - DNA, 60 bp, Homo sapiens
  ref <308>: DATABASE ACCESSION NUMBER: AF067972
ctactgtacaacccgacttcataatggtgctttcaaacagcgagatgagtaaaaacatca

SEQ ID NO: 406 - DNA, 60 bp, Homo sapiens
  ref <308>: DATABASE ACCESSION NUMBER: AF080158
aaagtgcttggagtacggtttgccacacacgtgactggacagtgtccaattcaaatcttt

SEQ ID NO: 407 - DNA, 60 bp, Homo sapiens
  ref <308>: DATABASE ACCESSION NUMBER: AF119666
agcatgtgctcttaatagcattatgtctaaagaagatatcacgtaagtttgcatcttagc

SEQ ID NO: 408 - DNA, 60 bp, Homo sapiens
  ref <308>: DATABASE ACCESSION NUMBER: AF121255
aaacacaagtgtggttttaaagccttgaacattctgatgttgtcactaaagttgatttcc

SEQ ID NO: 409 - DNA, 60 bp, Homo sapiens
  ref <308>: DATABASE ACCESSION NUMBER: AF131817
aagttgttgtgcaatacttaattcagacatgtaccacaagttaatggtagactaacactg

SEQ ID NO: 410 - DNA, 60 bp, Homo sapiens
  ref <308>: DATABASE ACCESSION NUMBER: AF154121
aggttcattcaaagagaaactcatgggatttgtaaccagatgaatcatgatttctaagac

SEQ ID NO: 411 - DNA, 60 bp, Homo sapiens
  ref <308>: DATABASE ACCESSION NUMBER: AK000770
gggttcagatgcccaggaaggaaaaggggacagcgctactgctatggaatgagaccacca

SEQ ID NO: 412 - DNA, 60 bp, Homo sapiens
  ref <308>: DATABASE ACCESSION NUMBER: AK001166
acccttagacctctgattctaagtcaaatgcaaatgggttaaataaaatgagactacttc

SEQ ID NO: 413 - DNA, 60 bp, Homo sapiens
  ref <308>: DATABASE ACCESSION NUMBER: AK001560
gaggggaccgtgtatctttataatctttctaactctcctgtgctaatctcagaggggtca

SEQ ID NO: 414 - DNA, 60 bp, Homo sapiens
  ref <308>: DATABASE ACCESSION NUMBER: AK002117
tcgtcttacttaagtcatagttaagatctgtgatacgaaccatagatattgcctgacaaa

SEQ ID NO: 415 - DNA, 60 bp, Homo sapiens
  ref <308>: DATABASE ACCESSION NUMBER: AL049229
tctgcctagttaagaaactgaattaatcagcagttacaaagcacatactttgttacgtgc

SEQ ID NO: 416 - DNA, 60 bp, Homo sapiens
  ref <308>: DATABASE ACCESSION NUMBER: AL049685
ttctccagcacattttaagaaaagggaccaaaagttattttagcttcctcaatagattgc

SEQ ID NO: 417 - DNA, 60 bp, Homo sapiens
  ref <308>: DATABASE ACCESSION NUMBER: AL049949
tagacttgaatctactctaaacgaatatttaatccaacctcactacattgtagctcagtc

SEQ ID NO: 418 - DNA, 60 bp, Homo sapiens
  ref <308>: DATABASE ACCESSION NUMBER: AL050015
agccaggactcctcatttcatctcacagacacaataaaaaagcatatttgtcctgcctgg

SEQ ID NO: 419 - DNA, 60 bp, Homo sapiens
  ref <308>: DATABASE ACCESSION NUMBER: AL050021
taaggctaatgataccaatgagggttggtttattatcaaacctgaatagctgtggtttct

SEQ ID NO: 420 - DNA, 60 bp, Homo sapiens
  ref <308>: DATABASE ACCESSION NUMBER: AL080065
gtgcctaaatcttttcagaggacaactttgactttcaagaggagattccaagtgacatct

SEQ ID NO: 421 - DNA, 60 bp, Homo sapiens
  ref <308>: DATABASE ACCESSION NUMBER: AL080169
ggagatcaacttctcctcactctgggacagacgatgtatggaaactaaaaagaacatgcg

SEQ ID NO: 422 - DNA, 60 bp, Homo sapiens
  ref <308>: DATABASE ACCESSION NUMBER: AL080199
taaacatagcaattgtcaagccatcaaaattatatatcgaaccacttaggcatgttacgg

SEQ ID NO: 423 - DNA, 60 bp, Homo sapiens
  ref <308>: DATABASE ACCESSION NUMBER: AL080218
atcctatgcagagttacagtcacaaagttgtgtattttatgttacaataaagccttcctc

SEQ ID NO: 424 - DNA, 60 bp, Homo sapiens
  ref <308>: DATABASE ACCESSION NUMBER: AL109696
gcataatagatgccctgtttattttctcagaatgtgacaataaaattaggaaaggagagg

SEQ ID NO: 425 - DNA, 60 bp, Homo sapiens
  ref <308>: DATABASE ACCESSION NUMBER: AL110280
ggaagacaacattcttcatctctcaggacttctaattccttgatgctaaaagaagaggca

SEQ ID NO: 426 - DNA, 60 bp, Homo sapiens
  ref <308>: DATABASE ACCESSION NUMBER: AL117544
actcaaagtatatagaagccttagaacaggagagaattcttcttaagatccaagaagaac

SEQ ID NO: 427 - DNA, 60 bp, Homo sapiens
  ref <308>: DATABASE ACCESSION NUMBER: AL117629
tgatgaacaagtgatggtttggaagagtaactttgatattgttgatcatggagaagtcac

SEQ ID NO: 428 - DNA, 60 bp, Homo sapiens
  ref <308>: DATABASE ACCESSION NUMBER: AL122091
tttgacttcaccctgtttgtaaataaaacaataaaatggaaggtgctgtggactggaaaa

SEQ ID NO: 429 - DNA, 60 bp, Homo sapiens
  ref <308>: DATABASE ACCESSION NUMBER: AL133017
tcccaattccacataagcacttttggaagaaaacagccaaagttggcctaaaattggcgc

SEQ ID NO: 430 - DNA, 60 bp, Homo sapiens
  ref <308>: DATABASE ACCESSION NUMBER: AL133052
aggtgtactctgagaagagaatcacgtttttctgttttgctaaggagaaaaccttgctgc

SEQ ID NO: 431 - DNA, 60 bp, Homo sapiens
  ref <308>: DATABASE ACCESSION NUMBER: AL133092
actcagaacatttcaatcagaatgaaccaaaagtcctatttaatcatttaatgggggagg

SEQ ID NO: 432 - DNA, 60 bp, Homo sapiens
  ref <308>: DATABASE ACCESSION NUMBER: AL137379
gcatagaagatccctgaccatttactaggaacctggttaagcaagcactaatctcttttc

SEQ ID NO: 433 - DNA, 60 bp, Homo sapiens
  ref <308>: DATABASE ACCESSION NUMBER: AL137566
agttattaatgctactaccctattttgagtaagtagtaggtccctaagtacattgtccag

SEQ ID NO: 434 - DNA, 60 bp, Homo sapiens
  ref <308>: DATABASE ACCESSION NUMBER: AL137698
ctgtcagaaacttgctaggactttagtggccaataaaaaagaaattcctaatttcaacct

SEQ ID NO: 435 - DNA, 60 bp, Homo sapiens
  ref <308>: DATABASE ACCESSION NUMBER: D00174
cagggaaggatcccatgagctccttaaggctcttttgtaaggtttttgtagtgattttta

SEQ ID NO: 436 - DNA, 60 bp, Homo sapiens
  ref <308>: DATABASE ACCESSION NUMBER: D14678
tagtgctaagatgctcatgtttgtgaacatttctccactggaagagaacgtctccgagtc

SEQ ID NO: 437 - DNA, 60 bp, Homo sapiens
  ref <308>: DATABASE ACCESSION NUMBER: D25304
ccatgcttacacactaaactataatataaaggaaatgaagccatgttaatctgagagcag

SEQ ID NO: 438 - DNA, 60 bp, Homo sapiens
  ref <308>: DATABASE ACCESSION NUMBER: D25328
tattttatcagcactttatgcacgtattattgacattaatacctaatcggcgagtgccca

SEQ ID NO: 439 - DNA, 60 bp, Homo sapiens
  ref <308>: DATABASE ACCESSION NUMBER: D38553
gggggtgagggtactattctggattgagaaaacctatatccattctttatatcaatgtat

SEQ ID NO: 440 - DNA, 60 bp, Homo sapiens
  ref <308>: DATABASE ACCESSION NUMBER: D42046
aagtaacagattttaacaaaggttaaaagattcttggggtaacagattcttctggggttg

SEQ ID NO: 441 - DNA, 60 bp, Homo sapiens
  ref <308>: DATABASE ACCESSION NUMBER: D55716
atgtgaatgaagccatcaggctaatggagatgtcaaaggactctcttctaggagacaagg

SEQ ID NO: 442 - DNA, 60 bp, Homo sapiens
  ref <308>: DATABASE ACCESSION NUMBER: D86978
acttctggacattgaaggattatattcaaaagttcgatctcgatatagtttcatacaggc

SEQ ID NO: 443 - DNA, 60 bp, Homo sapiens
  ref <308>: DATABASE ACCESSION NUMBER: D86980
accctccagaaagtttgtaccaaaacgctctcctatttggatcctagagagtaccctgtt

SEQ ID NO: 444 - DNA, 60 bp, Homo sapiens
  ref <308>: DATABASE ACCESSION NUMBER: L19778
aagactggcagttttctgtaaaggagggttatttactacggtagtgcaaataacttttgg

SEQ ID NO: 445 - DNA, 60 bp, Homo sapiens
  ref <308>: DATABASE ACCESSION NUMBER: L25080
aattagacactttggaagatggcataacctgtctcacctggacttaagcgtctggctcta

SEQ ID NO: 446 - DNA, 60 bp, Homo sapiens
  ref <308>: DATABASE ACCESSION NUMBER: L35035
tattgtgagcacacatagtacctagttacatcttaagatcaggtttataaaactgtggag

SEQ ID NO: 447 - DNA, 60 bp, Homo sapiens
  ref <308>: DATABASE ACCESSION NUMBER: M96577
gtaggacggtgagagcacttctgtcttaaaggttttttctgattgaagctttaatggagc

SEQ ID NO: 448 - DNA, 60 bp, Homo sapiens
  ref <308>: DATABASE ACCESSION NUMBER: NM_000014
cttgatttaccttgataaggtgtcaaatcagacactgagcttgttcttcacggttctgca

SEQ ID NO: 449 - DNA, 60 bp, Homo sapiens
  ref <308>: DATABASE ACCESSION NUMBER: NM_000076
gtattaataacgtctttttatatctaaatgtattctgcacgagaaggtacactggtccca

SEQ ID NO: 450 - DNA, 60 bp, Homo sapiens
  ref <308>: DATABASE ACCESSION NUMBER: NM_000109
cttttagacacattagctctggagtgagtctgtcataatatttgaacaaaaattgagagc

SEQ ID NO: 451 - DNA, 60 bp, Homo sapiens
  ref <308>: DATABASE ACCESSION NUMBER: NM_000114
tgtggatctgttcaaagtagtcactgtatatacgtatagagaggtagataggtaggtaga

SEQ ID NO: 452 - DNA, 60 bp, Homo sapiens
  ref <308>: DATABASE ACCESSION NUMBER: NM_000147
agcgccaaaattcgctatgtttacagtgatactattaagaaaatgaatgtgattctgctc

SEQ ID NO: 453 - DNA, 60 bp, Homo sapiens
  ref <308>: DATABASE ACCESSION NUMBER: NM_000150
gcagagagataatcaccgcaccgtttccagatgtaatactgcaaagaaaaccaatgatga

SEQ ID NO: 454 - DNA, 60 bp, Homo sapiens
  ref <308>: DATABASE ACCESSION NUMBER: NM_000291
acttagcattttctgcatctccacttggcattagctaaaaccttccatgtcaagattcag

SEQ ID NO: 455 - DNA, 60 bp, Homo sapiens
  ref <308>: DATABASE ACCESSION NUMBER: NM_000331
gagagcctactctgacatgagagaagccaattacatcggctcagacaaatacttccatgc

SEQ ID NO: 456 - DNA, 60 bp, Homo sapiens
  ref <308>: DATABASE ACCESSION NUMBER: NM_000587
gtctgagaacaaatacaattcagtcttctctttggggttttagtatgtgtcaaacatagg

SEQ ID NO: 457 - DNA, 60 bp, Homo sapiens
  ref <308>: DATABASE ACCESSION NUMBER: NM_000693
cagtattttatctcaagtagatatagacactaaccttgatagtgatacgttagagggttc

SEQ ID NO: 458 - DNA, 60 bp, Homo sapiens
  ref <308>: DATABASE ACCESSION NUMBER: NM_000785
tggctaagcatttatcaaagcataagctcagtaactgtgcatctggtctgtacctggttg

SEQ ID NO: 459 - DNA, 60 bp, Homo sapiens
  ref <308>: DATABASE ACCESSION NUMBER: NM_000820
agagcgggctcgaagaaaataattctctattatttttattaccaagcgcttctttctgac

SEQ ID NO: 460 - DNA, 60 bp, Homo sapiens
  ref <308>: DATABASE ACCESSION NUMBER: NM_000876
ttaagaaaaaagtgttgatcaaccattcgacctataagaagccttaatttgcacagtgtg

SEQ ID NO: 461 - DNA, 60 bp, Homo sapiens
  ref <308>: DATABASE ACCESSION NUMBER: NM_000903
gtcatctcattccactgttggtattatataattcaaggagaatatgataaaacactgccc

SEQ ID NO: 462 - DNA, 60 bp, Homo sapiens
  ref <308>: DATABASE ACCESSION NUMBER: NM_000926
gataacttgcatgatcttgtcaaacaacttcatctgtactgcttgaatacatttatccag

SEQ ID NO: 463 - DNA, 60 bp, Homo sapiens
  ref <308>: DATABASE ACCESSION NUMBER: NM_000927
ttaaaggaacagagtgagagacatcatcaagtggagagaaatcatagtttaaactgcatt

SEQ ID NO: 464 - DNA, 60 bp, Homo sapiens
  ref <308>: DATABASE ACCESSION NUMBER: NM_000988
cgccaagagatcaaagataaaatcttttgtgaaagtgtataactacaatcacctaatgcc

SEQ ID NO: 465 - DNA, 60 bp, Homo sapiens
  ref <308>: DATABASE ACCESSION NUMBER: NM_001034
ggtagtattgtaaaatttcaagtcatccttaaacaaaatgatccacctaagatcttgccc

SEQ ID NO: 466 - DNA, 60 bp, Homo sapiens
  ref <308>: DATABASE ACCESSION NUMBER: NM_001071
ccgaggtaaaagttctttttgctctaaaagaaaaaggaactaggtcaaaaatctgtccgt

SEQ ID NO: 467 - DNA, 60 bp, Homo sapiens
  ref <308>: DATABASE ACCESSION NUMBER: NM_001128
gtcatgaatagtctccatgattttcaaaattgattccctttaaagtgcaaaatggtcacc

SEQ ID NO: 468 - DNA, 60 bp, Homo sapiens
  ref <308>: DATABASE ACCESSION NUMBER: NM_001211
tgtggaacactgaaactgtatgtgctgtaatttaatttaggacacatttagatgcactac

SEQ ID NO: 469 - DNA, 60 bp, Homo sapiens
  ref <308>: DATABASE ACCESSION NUMBER: NM_001232
ttaaagattgctttatccagcagtcaattaactctccagttatcagtactcccacaattg

SEQ ID NO: 470 - DNA, 60 bp, Homo sapiens
  ref <308>: DATABASE ACCESSION NUMBER: NM_001237
gcacaacagtcaataagagaaaagtacaaaaattcaaagtatcatggtgtttctctcctc

SEQ ID NO: 471 - DNA, 60 bp, Homo sapiens
  ref <308>: DATABASE ACCESSION NUMBER: NM_001274
gttgggctatcaatggaagaaaagttgtatgaatcaggttactatatcaacaactgatag

SEQ ID NO: 472 - DNA, 60 bp, Homo sapiens
  ref <308>: DATABASE ACCESSION NUMBER: NM_001310
gtatcaacctgctgtatattagagcaactgaatataatatggaataagtttgaccaggtc

SEQ ID NO: 473 - DNA, 60 bp, Homo sapiens
  ref <308>: DATABASE ACCESSION NUMBER: NM_001463
agcttcgtcatcttggactcagtaaaagtgattctagcaatagtgattccactcagagtc

SEQ ID NO: 474 - DNA, 60 bp, Homo sapiens
  ref <308>: DATABASE ACCESSION NUMBER: NM_001605
gccaagagctcttcatctgctacaagaacatttgaatcttgggacctttaaagagcccct

SEQ ID NO: 475 - DNA, 60 bp, Homo sapiens
  ref <308>: DATABASE ACCESSION NUMBER: NM_001664
tgtcacttttctgataaaagatggccatattaccccttttcggccccatgtatctcagta

SEQ ID NO: 476 - DNA, 60 bp, Homo sapiens
  ref <308>: DATABASE ACCESSION NUMBER: NM_001673
ttcccttcaatactcctaaaaccaaagaaggatattactaccgtcaagtctttgaacgcc

SEQ ID NO: 477 - DNA, 60 bp, Homo sapiens
  ref <308>: DATABASE ACCESSION NUMBER: NM_001723
cagagtatgatgatatcggctacatatgcagtctgtgaattatgtaacatactctatttc

SEQ ID NO: 478 - DNA, 60 bp, Homo sapiens
  ref <308>: DATABASE ACCESSION NUMBER: NM_001762
cttcaggaaacattagttaaaattcaagcagaacattcagaatcaggtcagcttgtgggt

SEQ ID NO: 479 - DNA, 60 bp, Homo sapiens
  ref <308>: DATABASE ACCESSION NUMBER: NM_001765
gcccttggtgattctaatagtccttgtgttatggtttaagaagcactgctcatatcagga

SEQ ID NO: 480 - DNA, 60 bp, Homo sapiens
  ref <308>: DATABASE ACCESSION NUMBER: NM_001801
ttcaagtgctctcatagttctatcctctaattccattaaatccatactaggagcgtcagt

SEQ ID NO: 481 - DNA, 60 bp, Homo sapiens
  ref <308>: DATABASE ACCESSION NUMBER: NM_001809
ggggatgaatagaaaacctgtaagctttgatgttctggttacttctagtaaattcctgtc

SEQ ID NO: 482 - DNA, 60 bp, Homo sapiens
  ref <308>: DATABASE ACCESSION NUMBER: NM_001813
tgtagtgcagcttaatttcaattcagtctttactttgccactagagttgaaagataaggg

SEQ ID NO: 483 - DNA, 60 bp, Homo sapiens
  ref <308>: DATABASE ACCESSION NUMBER: NM_001830
aaacaaaaacatcaatgagtaggcattttatagctttaaccccgtatgagtttcaagctg

SEQ ID NO: 484 - DNA, 60 bp, Homo sapiens
  ref <308>: DATABASE ACCESSION NUMBER: NM_002001
atagaaatgcttcattaaactgagtgaaactggttaagtggcatgtaatagtaagtgctc

SEQ ID NO: 485 - DNA, 60 bp, Homo sapiens
  ref <308>: DATABASE ACCESSION NUMBER: NM_002036
tggaagcaaatcctagttctcttcccacctgtcaacctgaattaaagtctacactgcctt

SEQ ID NO: 486 - DNA, 60 bp, Homo sapiens
  ref <308>: DATABASE ACCESSION NUMBER: NM_002101
ctttgtctgccattgatccagctcagaacgattggaaataaatttgaaatgtaaccgagc

SEQ ID NO: 487 - DNA, 60 bp, Homo sapiens
  ref <308>: DATABASE ACCESSION NUMBER: NM_002125
agctgaagtgcagatgacacattcaaagaagaactttctgccccagctttgcaggatgaa

SEQ ID NO: 488 - DNA, 60 bp, Homo sapiens
  ref <308>: DATABASE ACCESSION NUMBER: NM_002142
ttccagaaccgcaggatgaaaatgaagaaaatcaacaaagaccgagcaaaagacgagtga

SEQ ID NO: 489 - DNA, 60 bp, Homo sapiens
  ref <308>: DATABASE ACCESSION NUMBER: NM_002358
atgctttcctaaatcagatgttttggtcaagtagtttgactcagtataggtagggagata

SEQ ID NO: 490 - DNA, 60 bp, Homo sapiens
  ref <308>: DATABASE ACCESSION NUMBER: NM_002405
ccacagctattccctccagcatctggttctgtacaaaaattaaatgcttatttgtttaag

SEQ ID NO: 491 - DNA, 60 bp, Homo sapiens
  ref <308>: DATABASE ACCESSION NUMBER: NM_002428
ctgcgggggttccgtgtccacccccatacatttatttctgtaaataatgtgcactgaata

SEQ ID NO: 492 - DNA, 60 bp, Homo sapiens
  ref <308>: DATABASE ACCESSION NUMBER: NM_002466
cttgtcctgaggtgttgagggtgtcacgagcccattctcatgtttacaggggttgtgggg

SEQ ID NO: 493 - DNA, 60 bp, Homo sapiens
  ref <308>: DATABASE ACCESSION NUMBER: NM_002624
agaggaagatagattttctaaccaagcagatggagaaaatccaaccagctcttcaggaga

SEQ ID NO: 494 - DNA, 60 bp, Homo sapiens
  ref <308>: DATABASE ACCESSION NUMBER: NM_002837
tgtttccaatctatgaaaatgtgaatccagagtatcacagagatccagtctattcaaggc

SEQ ID NO: 495 - DNA, 60 bp, Homo sapiens
  ref <308>: DATABASE ACCESSION NUMBER: NM_002875
ctattggaggaaatatcatcgcccatgcatcaacaaccagattgtatctgaggaaaggaa

SEQ ID NO: 496 - DNA, 60 bp, Homo sapiens
  ref <308>: DATABASE ACCESSION NUMBER: NM_002996
acaaggatgatctaggaagactttggaaagagtaggaagactttggaaagacttttccaa

SEQ ID NO: 497 - DNA, 60 bp, Homo sapiens
  ref <308>: DATABASE ACCESSION NUMBER: NM_003005
agtctctgtgctttgactcacctgttacttgaaataccagtgaaccaaagagactggagc

SEQ ID NO: 498 - DNA, 60 bp, Homo sapiens
  ref <308>: DATABASE ACCESSION NUMBER: NM_003012
ttctttctgtctgctttaaatggaaacagactcataccacacttacaattaaggtcaagc

SEQ ID NO: 499 - DNA, 60 bp, Homo sapiens
  ref <308>: DATABASE ACCESSION NUMBER: NM_003090
taatagccttgtttgtgttagcaaagtggaatctatcagcattgttgaaatgcttaagac

SEQ ID NO: 500 - DNA, 60 bp, Homo sapiens
  ref <308>: DATABASE ACCESSION NUMBER: NM_003152
tctctgtttgtaaccttgtcgacaaagaggtagaaaagattgggtctaggatatggtggg

SEQ ID NO: 501 - DNA, 60 bp, Homo sapiens
  ref <308>: DATABASE ACCESSION NUMBER: NM_003160
aaatgattgaggggagaacatatgatgaaaaggtggatttgtggtgcattggagtgctct

SEQ ID NO: 502 - DNA, 60 bp, Homo sapiens
  ref <308>: DATABASE ACCESSION NUMBER: NM_003183
cgtcagaatcgtgttgacagcaaagaaacagagtgctaatttagttctcagctcttctga

SEQ ID NO: 503 - DNA, 60 bp, Homo sapiens
  ref <308>: DATABASE ACCESSION NUMBER: NM_003195
aaacacagacatgaagtataagaaccgtgtacggagtcgtatctccaacctgaaggatgc

SEQ ID NO: 504 - DNA, 60 bp, Homo sapiens
  ref <308>: DATABASE ACCESSION NUMBER: NM_003243
gcaaattttgtatttcttacaggcctacagaaattgaaaatgaccaaaatcaggaaccac

SEQ ID NO: 505 - DNA, 60 bp, Homo sapiens
  ref <308>: DATABASE ACCESSION NUMBER: NM_003318
gaattctcctaactccattttgaaagctgctaaaactttatatgaacactatagtggtgg

SEQ ID NO: 506 - DNA, 60 bp, Homo sapiens
  ref <308>: DATABASE ACCESSION NUMBER: NM_003364
gcattccttctatctcaatcatgttgcatgagctcataaagctgctgtactatgcccggt

SEQ ID NO: 507 - DNA, 60 bp, Homo sapiens
  ref <308>: DATABASE ACCESSION NUMBER: NM_003504
caagtttctggacgcacttatttccctcctgtcctaggaatttgattcttccagaatgac

SEQ ID NO: 508 - DNA, 60 bp, Homo sapiens
  ref <308>: DATABASE ACCESSION NUMBER: NM_003551
taaagccatctcttattggttagaacttttgggaccaaataatagcttagtagcgaagga

SEQ ID NO: 509 - DNA, 60 bp, Homo sapiens
  ref <308>: DATABASE ACCESSION NUMBER: NM_003559
tgggatgagatatggtcagacttgtagataaccccaaagatgtgaagatcgcttgtgaaa

SEQ ID NO: 510 - DNA, 60 bp, Homo sapiens
  ref <308>: DATABASE ACCESSION NUMBER: NM_003579
acagggccctgttgaattttgttctctgggagaaaatcatcaagaagggctgcatgatgt

SEQ ID NO: 511 - DNA, 60 bp, Homo sapiens
  ref <308>: DATABASE ACCESSION NUMBER: NM_003600
agagtgtgaaaaataggaacacgtgctctacctccatttagggatttgcttgggatacag

SEQ ID NO: 512 - DNA, 60 bp, Homo sapiens
  ref <308>: DATABASE ACCESSION NUMBER: NM_003626
acttctacagatgattatgcagcatttgaatccaacaaagactacattttggaaccagtg

SEQ ID NO: 513 - DNA, 60 bp, Homo sapiens
  ref <308>: DATABASE ACCESSION NUMBER: NM_003686
ccggggttacagatcaaactcaatgagctctggaaaaactttggatttaaaaaattctga

SEQ ID NO: 514 - DNA, 60 bp, Homo sapiens
  ref <308>: DATABASE ACCESSION NUMBER: NM_003722
tattgcccttacgtagttgtttaccattattcaaagctcaaaatagaatttgaagccctc

SEQ ID NO: 515 - DNA, 60 bp, Homo sapiens
  ref <308>: DATABASE ACCESSION NUMBER: NM_003824
cacacagcactctctaaatcttccttgtgaggattatgggtcctgcaattctacagtttc

SEQ ID NO: 516 - DNA, 60 bp, Homo sapiens
  ref <308>: DATABASE ACCESSION NUMBER: NM_003862
aggacttgaatgaggaaaccaacactttgagaaaccaaagtcctttttcccaaaggttct

SEQ ID NO: 517 - DNA, 60 bp, Homo sapiens
  ref <308>: DATABASE ACCESSION NUMBER: NM_003864
ataccaattacaagtaaatacacttaggagatacaaaagacacttcaagctaccaaccag

SEQ ID NO: 518 - DNA, 60 bp, Homo sapiens
  ref <308>: DATABASE ACCESSION NUMBER: NM_003956
ctcacctcaatagccttgaatcctgcatatgaattagacattcatcactggcatatttag

SEQ ID NO: 519 - DNA, 60 bp, Homo sapiens
  ref <308>: DATABASE ACCESSION NUMBER: NM_003970
aaagctaatgttttccacaagactgaacaacgtgtatttacacgagggtagacggcagat

SEQ ID NO: 520 - DNA, 60 bp, Homo sapiens
  ref <308>: DATABASE ACCESSION NUMBER: NM_003981
tgcagcagtactactgtcaacatagtgtaaatggttctcaaaagcttaccagtgtggact

SEQ ID NO: 521 - DNA, 60 bp, Homo sapiens
  ref <308>: DATABASE ACCESSION NUMBER: NM_004153
caggatgatgtgctgtatgcgctgaaagacgagtaaaggggcttcacaagttaaaagact

SEQ ID NO: 522 - DNA, 60 bp, Homo sapiens
  ref <308>: DATABASE ACCESSION NUMBER: NM_004162
gggctgcttttctaacccaaactgtatgtcttgatgacactacagtaaagtttgaaatct

SEQ ID NO: 523 - DNA, 60 bp, Homo sapiens
  ref <308>: DATABASE ACCESSION NUMBER: NM_004203
ctggccgtgtctaataaaaagtatttgaaccttgggagcacccaagcttgctcatgtggc

SEQ ID NO: 524 - DNA, 60 bp, Homo sapiens
  ref <308>: DATABASE ACCESSION NUMBER: NM_004216
tggcgtgactacatcaatggctctttattagaggcacttaaaggtgtcttcatcacagac

SEQ ID NO: 525 - DNA, 60 bp, Homo sapiens
  ref <308>: DATABASE ACCESSION NUMBER: NM_004217
gtctgtgtatgtataggggaaagaagggatccctaactgttcccttatctgttttctacc

SEQ ID NO: 526 - DNA, 60 bp, Homo sapiens
  ref <308>: DATABASE ACCESSION NUMBER: NM_004336
ttagggccctacgtaataggctaattgtactgctcttagaatgtaagcgttcacgaaaat

SEQ ID NO: 527 - DNA, 60 bp, Homo sapiens
  ref <308>: DATABASE ACCESSION NUMBER: NM_004349
atgtgttggacaaatgtgaagatgcattgtagtttaaccatatgcccacatttagtctct

SEQ ID NO: 528 - DNA, 60 bp, Homo sapiens
  ref <308>: DATABASE ACCESSION NUMBER: NM_004456
aaatcattcggtaaatccaaactgctatgcaaaagttatgatggttaacggtgatcacag

SEQ ID NO: 529 - DNA, 60 bp, Homo sapiens
  ref <308>: DATABASE ACCESSION NUMBER: NM_004526
tttatgacagtgagctcttcaggatgaacaagttcagccacgacctgaaaaggaaaatga

SEQ ID NO: 530 - DNA, 60 bp, Homo sapiens
  ref <308>: DATABASE ACCESSION NUMBER: NM_004527
gtgagtttggatctcttgtacgcagatgtaatcattcacatgtaaaaataaccccacctc

SEQ ID NO: 531 - DNA, 60 bp, Homo sapiens
  ref <308>: DATABASE ACCESSION NUMBER: NM_004603
ccaaaggtcttggtacaaccagctgcccattttgtgaaatttttatgtagaataaacatt

SEQ ID NO: 532 - DNA, 60 bp, Homo sapiens
  ref <308>: DATABASE ACCESSION NUMBER: NM_004615
tggtaaatgccacacacctttaagtagataagcagacgatagttatctgttcttttgact

SEQ ID NO: 533 - DNA, 60 bp, Homo sapiens
  ref <308>: DATABASE ACCESSION NUMBER: NM_004631
gtcagtgtacagacattccatggtaccagagtgctcagaaagtcaagataggatatgcct

SEQ ID NO: 534 - DNA, 60 bp, Homo sapiens
  ref <308>: DATABASE ACCESSION NUMBER: NM_004642
tccttttcataagctaataccactgtagggattttgttttgaacgcatattgacagcacg

SEQ ID NO: 535 - DNA, 60 bp, Homo sapiens
  ref <308>: DATABASE ACCESSION NUMBER: NM_004701
agaactcttgattttgtacatagtcctctggtctatctcatgaaacctcttctcagacca

SEQ ID NO: 536 - DNA, 60 bp, Homo sapiens
  ref <308>: DATABASE ACCESSION NUMBER: NM_004774
atgaaaaagcaatacattccttgatgcatttgcatgaaggttgttcaactttgtttgagg

SEQ ID NO: 537 - DNA, 60 bp, Homo sapiens
  ref <308>: DATABASE ACCESSION NUMBER: NM_004787
gtgatcgagaaatctcttgtcgaggggaaaggataagagattattaccaaaagcagcagg

SEQ ID NO: 538 - DNA, 60 bp, Homo sapiens
  ref <308>: DATABASE ACCESSION NUMBER: NM_004827
taatctaaaaaaggagaattgaattctggaaactcctgacaagttattactgtctctggc

SEQ ID NO: 539 - DNA, 60 bp, Homo sapiens
  ref <308>: DATABASE ACCESSION NUMBER: NM_004861
acagagagggcctaaccgagatcagtatttaactaattataccagtttttattaaacccc

SEQ ID NO: 540 - DNA, 60 bp, Homo sapiens
  ref <308>: DATABASE ACCESSION NUMBER: NM_004867
gaggcaacagatagagtgtccttggtaataagaagtcagagatttacaatatgactttaa

SEQ ID NO: 541 - DNA, 60 bp, Homo sapiens
  ref <308>: DATABASE ACCESSION NUMBER: NM_004887
agaagggaaaactccaaaccagttgggagacttgtgcaaaggactttgcagattaaaaaa

SEQ ID NO: 542 - DNA, 60 bp, Homo sapiens
  ref <308>: DATABASE ACCESSION NUMBER: NM_004944
caaacgctcctagacccaagggtctcatcttattaaccatttcttgcctctaaataaaat

SEQ ID NO: 543 - DNA, 60 bp, Homo sapiens
  ref <308>: DATABASE ACCESSION NUMBER: NM_004981
gcctgttgctcatgactttcttttgtaaatatctataaatggagacagatggagacacca

SEQ ID NO: 544 - DNA, 60 bp, Homo sapiens
  ref <308>: DATABASE ACCESSION NUMBER: NM_005176
cgtggttggctcagggtttgacagagaaaagacaaataaatactgtattaataagatgtt

SEQ ID NO: 545 - DNA, 60 bp, Homo sapiens
  ref <308>: DATABASE ACCESSION NUMBER: NM_005192
agagcctattgaagatgaacagactccaattcatatatcatggctatctttgtcacgagt

SEQ ID NO: 546 - DNA, 60 bp, Homo sapiens
  ref <308>: DATABASE ACCESSION NUMBER: NM_005231
atcatgttcaatttcagtagtttgatcagttgaaggctagaagtgtgaagtgcagatgag

SEQ ID NO: 547 - DNA, 60 bp, Homo sapiens
  ref <308>: DATABASE ACCESSION NUMBER: NM_005269
taaagagtagggaatctcatccatcacagatcgcatttcctaaggggtttctatccttcc

SEQ ID NO: 548 - DNA, 60 bp, Homo sapiens
  ref <308>: DATABASE ACCESSION NUMBER: NM_005447
cagtttcagtgaagttgagcaaaatctagacttgcagtatgaggaaaaccagactctgga

SEQ ID NO: 549 - DNA, 60 bp, Homo sapiens
  ref <308>: DATABASE ACCESSION NUMBER: NM_005542
accagacctaatttgcaagtattgggtcttcaaacttcaagtgcaatgtattatgaaaac

SEQ ID NO: 550 - DNA, 60 bp, Homo sapiens
  ref <308>: DATABASE ACCESSION NUMBER: NM_005573
tttgttgcaagatgtgaattattgacactgaacttaataactgtgtactgttcggaaggg

SEQ ID NO: 551 - DNA, 60 bp, Homo sapiens
  ref <308>: DATABASE ACCESSION NUMBER: NM_005721
tctgattactcgcattctgtttcttgctttaaaagaagagtaaagacaagagtgttggac

SEQ ID NO: 552 - DNA, 60 bp, Homo sapiens
  ref <308>: DATABASE ACCESSION NUMBER: NM_005733
tgctttaccatatatcaggaattatatccaggatgcaatactcagacactagcttttttc

SEQ ID NO: 553 - DNA, 60 bp, Homo sapiens
  ref <308>: DATABASE ACCESSION NUMBER: NM_005792
acctcaggtttctcttaatatagttctccagtcactgaccttgaattgacttacataaac

SEQ ID NO: 554 - DNA, 60 bp, Homo sapiens
  ref <308>: DATABASE ACCESSION NUMBER: NM_005856
gtttcttagcacagaatccagcctagccttagccgcagtctaggccctgcttggactagg

SEQ ID NO: 555 - DNA, 60 bp, Homo sapiens
  ref <308>: DATABASE ACCESSION NUMBER: NM_005915
ttggtagttaaccctaactacttgctcgaagattgagatagtgaaagtaactgaccagag

SEQ ID NO: 556 - DNA, 60 bp, Homo sapiens
  ref <308>: DATABASE ACCESSION NUMBER: NM_006027
caaactcaatgagctctggaaaaactttggatttaaaaaagattctgaaaagcttcctcc

SEQ ID NO: 557 - DNA, 60 bp, Homo sapiens
  ref <308>: DATABASE ACCESSION NUMBER: NM_006070
agccatcttacttggctttttactattaacatgatgtactaaagtagagccctttgagaa

SEQ ID NO: 558 - DNA, 60 bp, Homo sapiens
  ref <308>: DATABASE ACCESSION NUMBER: NM_006141
ctggatagaatgactcgaaagccagactctatggtaacaaactcttcaacagaaaatgaa

SEQ ID NO: 559 - DNA, 60 bp, Homo sapiens
  ref <308>: DATABASE ACCESSION NUMBER: NM_006274
agcccggagtccgagtcaagcattgtgaattattacctaacctggggaaccgaggaccag

SEQ ID NO: 560 - DNA, 60 bp, Homo sapiens
  ref <308>: DATABASE ACCESSION NUMBER: NM_006344
cgctctgggagagaaataagcactgggagattggaagcactgctaacattttgaattttt

SEQ ID NO: 561 - DNA, 60 bp, Homo sapiens
  ref <308>: DATABASE ACCESSION NUMBER: NM_006441
ggtcccagtgaatgaaaacgacatgaaggtagatgaagtcctttacgaagactcgtcaac

SEQ ID NO: 562 - DNA, 60 bp, Homo sapiens
  ref <308>: DATABASE ACCESSION NUMBER: NM_006461
ctgacaaggagttagaaaaactagatgacattgttcagcatatttataagaccctgctct

SEQ ID NO: 563 - DNA, 60 bp, Homo sapiens
  ref <308>: DATABASE ACCESSION NUMBER: NM_006614
gttatctgtggtagtatatatcctagtgttcctatagtgaaataagtagggttcagccaa

SEQ ID NO: 564 - DNA, 60 bp, Homo sapiens
  ref <308>: DATABASE ACCESSION NUMBER: NM_006636
agaactgaattggctaggaaaaaagaaaaactgcatgttaatcattttcctaagctgtcc

SEQ ID NO: 565 - DNA, 60 bp, Homo sapiens
  ref <308>: DATABASE ACCESSION NUMBER: NM_006749
tttccaaatgatgtttttgccttctaatatactgtaaggtaatgagcttcagaacaggca

SEQ ID NO: 566 - DNA, 60 bp, Homo sapiens
  ref <308>: DATABASE ACCESSION NUMBER: NM_006826
gctcttaatgtattcctttttagtaggaatccggaagtattagattgaatggaaaagcac

SEQ ID NO: 567 - DNA, 60 bp, Homo sapiens
  ref <308>: DATABASE ACCESSION NUMBER: NM_006829
ggcctctgacaccttctctgggatcgggaaaaaattcggcctcctgaaatgacagcaggg

SEQ ID NO: 568 - DNA, 60 bp, Homo sapiens
  ref <308>: DATABASE ACCESSION NUMBER: NM_006845
aaatgtttctgagacctctttctactttactgtctccctagagtcctagaggatccctac

SEQ ID NO: 569 - DNA, 60 bp, Homo sapiens
  ref <308>: DATABASE ACCESSION NUMBER: NM_006983
gaccttccgctgcggccagaagatcctccacaagaaagggaaagtgtactggtacaagga

SEQ ID NO: 570 - DNA, 60 bp, Homo sapiens
  ref <308>: DATABASE ACCESSION NUMBER: NM_007019
tggaaaaaccccacagcttttaagaagtacctgcaagaaacctactcaaagcaggtcacc

SEQ ID NO: 571 - DNA, 60 bp, Homo sapiens
  ref <308>: DATABASE ACCESSION NUMBER: NM_007057
agaattataacagtgagctcatctgactgttttaggatgtacagcctagtgttaacattc

SEQ ID NO: 572 - DNA, 60 bp, Homo sapiens
  ref <308>: DATABASE ACCESSION NUMBER: NM_007210
gaacaactgcactgtcacaacttttcctggtacctgcacaatgtctacccagagatgttt

SEQ ID NO: 573 - DNA, 60 bp, Homo sapiens
  ref <308>: DATABASE ACCESSION NUMBER: NM_007370
tcctgacagagatacacttgtttgtgcatagagttgactttccatcttcagttcgaatac

SEQ ID NO: 574 - DNA, 60 bp, Homo sapiens
  ref <308>: DATABASE ACCESSION NUMBER: NM_012087
tatcggcagatgttctaccagttatgcgacttgaatgtggaagagttgcagaagatcatt

SEQ ID NO: 575 - DNA, 60 bp, Homo sapiens
  ref <308>: DATABASE ACCESSION NUMBER: NM_012111
tttactgatctggtccctgagaaacatattgtgatgaagtggaggtttaaatcttggcca

SEQ ID NO: 576 - DNA, 60 bp, Homo sapiens
  ref <308>: DATABASE ACCESSION NUMBER: NM_012291
agcctcataactgttctacctccaaggttagatttaatccttaggataactcttttaaag

SEQ ID NO: 577 - DNA, 60 bp, Homo sapiens
  ref <308>: DATABASE ACCESSION NUMBER: NM_012310
ccagaagggtgctaagtcacctactgaagagagaaccaactgactttcctattgactcat

SEQ ID NO: 578 - DNA, 60 bp, Homo sapiens
  ref <308>: DATABASE ACCESSION NUMBER: NM_012394
agcttcaggcaaagggaaaagaactaaatgaattccgggaaaagcacaacattcgtctca

SEQ ID NO: 579 - DNA, 60 bp, Homo sapiens
  ref <308>: DATABASE ACCESSION NUMBER: NM_012412
gtaatgcttctaaggatctcaaagtaaagcgtatcactccgcgtcacttgcagcttgcaa

SEQ ID NO: 580 - DNA, 60 bp, Homo sapiens
  ref <308>: DATABASE ACCESSION NUMBER: NM_012450
agtgaactgcaggaatcctccaacaaccacaaacacatcgttcgctgttagtgtcttctt

SEQ ID NO: 581 - DNA, 60 bp, Homo sapiens
  ref <308>: DATABASE ACCESSION NUMBER: NM_012453
aagtagaaaagagtagtactattgtccaatgtcatgaaagtggtaaaagtgggaaccagt

SEQ ID NO: 582 - DNA, 60 bp, Homo sapiens
  ref <308>: DATABASE ACCESSION NUMBER: NM_012464
acaaaagcataagatatccagataccacacataccaaaaaataacaccaaaacctctgtc

SEQ ID NO: 583 - DNA, 60 bp, Homo sapiens
  ref <308>: DATABASE ACCESSION NUMBER: NM_013242
atccatgcaaattgtcgcatccgacgggtttacttctcagacagactctactcagaagat

SEQ ID NO: 584 - DNA, 60 bp, Homo sapiens
  ref <308>: DATABASE ACCESSION NUMBER: NM_013261
ctgtagtctaagacctgatctatagatacctagaatagccatgtactataatgtgatgat

SEQ ID NO: 585 - DNA, 60 bp, Homo sapiens
  ref <308>: DATABASE ACCESSION NUMBER: NM_013272
taacctggaagaccatgagtggtgtgaaaacatggagtccgttttatagtgactaaagga

SEQ ID NO: 586 - DNA, 60 bp, Homo sapiens
  ref <308>: DATABASE ACCESSION NUMBER: NM_013277
ctcattccccattatgaactgagctataatatggagctttcataaaaatgggatgcattg

SEQ ID NO: 587 - DNA, 60 bp, Homo sapiens
  ref <308>: DATABASE ACCESSION NUMBER: NM_013981
ggcaaaggcgtttttatagggaaactatttatatgtaacatcctgatttacagcttcggg

SEQ ID NO: 588 - DNA, 60 bp, Homo sapiens
  ref <308>: DATABASE ACCESSION NUMBER: NM_013999
ttcttaagattacatcaagctaattgtgcgagctcaattcactttgtaagaaaactctcg

SEQ ID NO: 589 - DNA, 60 bp, Homo sapiens
  ref <308>: DATABASE ACCESSION NUMBER: NM_014015
gtgcctacttaattctgataaacctgtctaagcaatacttaggaggcttacttctttgga

SEQ ID NO: 590 - DNA, 60 bp, Homo sapiens
  ref <308>: DATABASE ACCESSION NUMBER: NM_014067
acaaggacaaggtggaccggctgatcatctgcgtgttcctcgagaaggacgaggacatct

SEQ ID NO: 591 - DNA, 60 bp, Homo sapiens
  ref <308>: DATABASE ACCESSION NUMBER: NM_014176
cactccaatttatcatccaaacattgattctgctggaaggatttgtctggatgttctcaa

SEQ ID NO: 592 - DNA, 60 bp, Homo sapiens
  ref <308>: DATABASE ACCESSION NUMBER: NM_014251
atgaaaaccacattggagatgtttagtaatcatattgttactggtaccaagactactagg

SEQ ID NO: 593 - DNA, 60 bp, Homo sapiens
  ref <308>: DATABASE ACCESSION NUMBER: NM_014258
cagagaactgatgtcagtattcatgtctcatgaaagaaatgctaatgtgtgaaatctagt

SEQ ID NO: 594 - DNA, 60 bp, Homo sapiens
  ref <308>: DATABASE ACCESSION NUMBER: NM_014317
tcagctttcagaaattgtactcacaagagataaatgacaactctttctgttctttctggc

SEQ ID NO: 595 - DNA, 60 bp, Homo sapiens
  ref <308>: DATABASE ACCESSION NUMBER: NM_014370
ccactggtgactacctgttcgagccgcattctggagaagactacagtcgtgatgaggacc

SEQ ID NO: 596 - DNA, 60 bp, Homo sapiens
  ref <308>: DATABASE ACCESSION NUMBER: NM_014669
ttgacgagtatcatagtggtcatattgatagagcttttgatatcattgagcgcttgaagc

SEQ ID NO: 597 - DNA, 60 bp, Homo sapiens
  ref <308>: DATABASE ACCESSION NUMBER: NM_014736
aaggaattggagaattctttaggttgtcccctaaagattctgaaaaagagaatcagattc

SEQ ID NO: 598 - DNA, 60 bp, Homo sapiens
  ref <308>: DATABASE ACCESSION NUMBER: NM_014737
cagcacacattttcacgtttccacttaaatcgttttgcacaaagtcttgcttcgctcaga

SEQ ID NO: 599 - DNA, 60 bp, Homo sapiens
  ref <308>: DATABASE ACCESSION NUMBER: NM_014773
tttgaggtccccatttgggaaacatgtgccagaaatgtctaggtgtttaataaaacagat

SEQ ID NO: 600 - DNA, 60 bp, Homo sapiens
  ref <308>: DATABASE ACCESSION NUMBER: NM_014791
gatacagcctacataaagactgttatgatcgctttgattttaaagttcattggaactacc

SEQ ID NO: 601 - DNA, 60 bp, Homo sapiens
  ref <308>: DATABASE ACCESSION NUMBER: NM_014926
aaagcaactgggtatatatcactaacagctttgtaggaagcacttttaatgttttctctc

SEQ ID NO: 602 - DNA, 60 bp, Homo sapiens
  ref <308>: DATABASE ACCESSION NUMBER: NM_015544
tactacagttaggggagatgccattcactctctgcaagaggagtattgaaaactggtgga

SEQ ID NO: 603 - DNA, 60 bp, Homo sapiens
  ref <308>: DATABASE ACCESSION NUMBER: NM_015710
ggaggaatatgatcgagcctcgagagagagccaagttcaaacgcaagtacaaggtgaagc

SEQ ID NO: 604 - DNA, 60 bp, Homo sapiens
  ref <308>: DATABASE ACCESSION NUMBER: NM_015969
tctggatccctatttattaaagtattttaataagcggaaaacctactttgctcacgatgc

SEQ ID NO: 605 - DNA, 60 bp, Homo sapiens
  ref <308>: DATABASE ACCESSION NUMBER: NM_015982
ttcatgacatcaaaacaccagcttttcaccttttccttgagactcaggaggaccaaagca

SEQ ID NO: 606 - DNA, 60 bp, Homo sapiens
  ref <308>: DATABASE ACCESSION NUMBER: NM_015987
gcatgttccatatactaagtctcttttctcacggtaggaaataatacagccaagatatgc

SEQ ID NO: 607 - DNA, 60 bp, Homo sapiens
  ref <308>: DATABASE ACCESSION NUMBER: NM_016049
aattgcagaattcttccctgatgcagtacttattatgttggataatcagaaactggtgcc

SEQ ID NO: 608 - DNA, 60 bp, Homo sapiens
  ref <308>: DATABASE ACCESSION NUMBER: NM_016101
aaatggggtttcagatctttgtgacgaaatagaatactgtttcatatttgaatcagaggg

SEQ ID NO: 609 - DNA, 60 bp, Homo sapiens
  ref <308>: DATABASE ACCESSION NUMBER: NM_016250
agtggtcctcaggatgtgataaaaacatccagtgtaaaaaggaagttggaatgggagttg

SEQ ID NO: 610 - DNA, 60 bp, Homo sapiens
  ref <308>: DATABASE ACCESSION NUMBER: NM_016359
acattgcttacttaaaagctacatagccctatcgaaatgcgaggattaatgctttaatgc

SEQ ID NO: 611 - DNA, 60 bp, Homo sapiens
  ref <308>: DATABASE ACCESSION NUMBER: NM_016442
acttcaagataagggaatatgattgatgattggtacgaaaaatgtcaaaatgtgttcccc

SEQ ID NO: 612 - DNA, 60 bp, Homo sapiens
  ref <308>: DATABASE ACCESSION NUMBER: NM_016602
acctaaagggactacctctgtgccttgccacattaaattgataacatggaaatgaaaaaa

SEQ ID NO: 613 - DNA, 60 bp, Homo sapiens
  ref <308>: DATABASE ACCESSION NUMBER: NM_016815
taaaaggtacctttgtctgccattgatccagctcagaacgattggaaataaatttgaaat

SEQ ID NO: 614 - DNA, 60 bp, Homo sapiens
  ref <308>: DATABASE ACCESSION NUMBER: NM_017613
tgaggaaaaaagccttctagcaaggaaattcaagattcttgaagttgaaggaatatactg

SEQ ID NO: 615 - DNA, 60 bp, Homo sapiens
  ref <308>: DATABASE ACCESSION NUMBER: NM_017647
ttttttaaaccgttaaagggaagttcggtgttggagcgatactcaatgtagtcagtctac

SEQ ID NO: 616 - DNA, 60 bp, Homo sapiens
  ref <308>: DATABASE ACCESSION NUMBER: NM_017681
tagtgctagatactgtaaagtctcttcttctcaaaggaacctactgtctagtttgagata

SEQ ID NO: 617 - DNA, 60 bp, Homo sapiens
  ref <308>: DATABASE ACCESSION NUMBER: NM_017697
ataggcatttaaaatgtgaatttggaatcagatgtctccattacttccagttaaagtggc

SEQ ID NO: 618 - DNA, 60 bp, Homo sapiens
  ref <308>: DATABASE ACCESSION NUMBER: NM_017870
tgccccttatttatgggaaccatctcattctaacagaataaaccgagaaggaaaccagaa

SEQ ID NO: 619 - DNA, 60 bp, Homo sapiens
  ref <308>: DATABASE ACCESSION NUMBER: NM_017888
gtatgcaggaacataaaataaaatatcctttagctcagaaattctatcttcgggagtcac

SEQ ID NO: 620 - DNA, 60 bp, Homo sapiens
  ref <308>: DATABASE ACCESSION NUMBER: NM_017899
gcaccttgtgtcttgtagggtatggtatgtgggacttcgctgtttttatctccaataaaa

SEQ ID NO: 621 - DNA, 60 bp, Homo sapiens
  ref <308>: DATABASE ACCESSION NUMBER: NM_017975
acaagaacaggtttatcgtgtccaaaaactccaccatattctagaaatattagtcagttg

SEQ ID NO: 622 - DNA, 60 bp, Homo sapiens
  ref <308>: DATABASE ACCESSION NUMBER: NM_018014
tcagataggacaattaagtgcactgtacaattttcccagtttacaggtctatacttaagg

SEQ ID NO: 623 - DNA, 60 bp, Homo sapiens
  ref <308>: DATABASE ACCESSION NUMBER: NM_018101
agtggaaatttggataagggaactgtagggcccagattctggaggttttatgtcattggc

SEQ ID NO: 624 - DNA, 60 bp, Homo sapiens
  ref <308>: DATABASE ACCESSION NUMBER: NM_018114
ctgtacgcacagagatggtgaggcatagacaaccaggacactctacactctattctttat

SEQ ID NO: 625 - DNA, 60 bp, Homo sapiens
  ref <308>: DATABASE ACCESSION NUMBER: NM_018131
tttatccaagcacttagaaaacctacaatcctaattttgatgtccattgttaagaggtgg

SEQ ID NO: 626 - DNA, 60 bp, Homo sapiens
  ref <308>: DATABASE ACCESSION NUMBER: NM_018154
tccagctttctggtgtcacaggcgggaatgttagttagtaggtagacttagatcccattt

SEQ ID NO: 627 - DNA, 60 bp, Homo sapiens
  ref <308>: DATABASE ACCESSION NUMBER: NM_018286
cattggacagtgttagccagttgtaatgatgtatcagaagtaaagaaaaacccattaaag

SEQ ID NO: 628 - DNA, 60 bp, Homo sapiens
  ref <308>: DATABASE ACCESSION NUMBER: NM_018335
gctgtctacatttttctatggagcttgtcataataatagcagatattacctgatcaggaa

SEQ ID NO: 629 - DNA, 60 bp, Homo sapiens
  ref <308>: DATABASE ACCESSION NUMBER: NM_018390
gtcaggggcgtatccacaaaatcaccaaattcatacagatcgtttaaataaatgaacatc

SEQ ID NO: 630 - DNA, 60 bp, Homo sapiens
  ref <308>: DATABASE ACCESSION NUMBER: NM_018410
agtgatttcatgctagaaaaattggaaactaaaagtgtgtagctaggttatttcggagtg

SEQ ID NO: 631 - DNA, 60 bp, Homo sapiens
  ref <308>: DATABASE ACCESSION NUMBER: NM_018492
gaactggatgaatcataccagaaagtaattgaactcttctctgtatgcactaatgaagac

SEQ ID NO: 632 - DNA, 60 bp, Homo sapiens
  ref <308>: DATABASE ACCESSION NUMBER: NM_018518
atagagtgttcacttctttatcataacaaaattctagtgtttatacgaacacccagaggc

SEQ ID NO: 633 - DNA, 60 bp, Homo sapiens
  ref <308>: DATABASE ACCESSION NUMBER: NM_018655
atggactgccccctaagaaacctgtttgagaatcactgaattaaaaatataatccatagg

SEQ ID NO: 634 - DNA, 60 bp, Homo sapiens
  ref <308>: DATABASE ACCESSION NUMBER: NM_018659
ttagatacacagcatgttgatttggtcactaaaaagaagaaaaggactaacaagcttcac

SEQ ID NO: 635 - DNA, 60 bp, Homo sapiens
  ref <308>: DATABASE ACCESSION NUMBER: NM_018944
aaggaacagaagctatccaaacgtgaaaaggaaaatggttgcgtccttgagactttgtgc

SEQ ID NO: 636 - DNA, 60 bp, Homo sapiens
  ref <308>: DATABASE ACCESSION NUMBER: NM_019013
aagaaaccagcatgtgactttcctagataacactgctttctcataataaagactatttgc

SEQ ID NO: 637 - DNA, 60 bp, Homo sapiens
  ref <308>: DATABASE ACCESSION NUMBER: NM_020397
tgagacatatgagaaaactacacctcggcagcagcctggacagttcaaatgcaagtgttt

SEQ ID NO: 638 - DNA, 60 bp, Homo sapiens
  ref <308>: DATABASE ACCESSION NUMBER: NM_020675
ccaggatcttaaggaagaatattctaggaagaaggaaactatttctactgctaataaagc

SEQ ID NO: 639 - DNA, 60 bp, Homo sapiens
  ref <308>: DATABASE ACCESSION NUMBER: NM_020980
cacacttactgagtacagatgaaggaaagtggtagcaatttaatcataactttcatttgc

SEQ ID NO: 640 - DNA, 60 bp, Homo sapiens
  ref <308>: DATABASE ACCESSION NUMBER: NM_020990
gtaacatgaagagagtgtttgaaagattctgccgaggcctcaaagaggtggagagactta

SEQ ID NO: 641 - DNA, 60 bp, Homo sapiens
  ref <308>: DATABASE ACCESSION NUMBER: NM_021052
ggcaaaagctaaaacgcgttcttccagggccggtcttcagtttccagttggccgtgtgca

SEQ ID NO: 642 - DNA, 60 bp, Homo sapiens
  ref <308>: DATABASE ACCESSION NUMBER: NM_021064
tgtctgcctcacagataggagggaaaatatatagaggattataatatggttcaacaaatg

SEQ ID NO: 643 - DNA, 60 bp, Homo sapiens
  ref <308>: DATABASE ACCESSION NUMBER: NM_021128
gtgtgtgtgtatcccataccccactctggaaggaaccatccagtaaaggtctttcagaac

SEQ ID NO: 644 - DNA, 60 bp, Homo sapiens
  ref <308>: DATABASE ACCESSION NUMBER: NM_021183
tcactgcagtagggctctgcaaataaaataatgtaacctattatcatggatctaatgtac

SEQ ID NO: 645 - DNA, 60 bp, Homo sapiens
  ref <308>: DATABASE ACCESSION NUMBER: NM_021225
ctctgatatcttagaagaaataaactgcaatgattttgatggaaccaaccctgatctaac

SEQ ID NO: 646 - DNA, 60 bp, Homo sapiens
  ref <308>: DATABASE ACCESSION NUMBER: S62027
atgctagtttccaaatgttgtgaagaagtaagagattacgttgaagaacgatctggcgag

SEQ ID NO: 647 - DNA, 60 bp, Homo sapiens
  ref <308>: DATABASE ACCESSION NUMBER: U20180
gctcgaagaggtaatgatgctgtaatgacaagaggcacttttgcaaatatcaagcttttt

SEQ ID NO: 648 - DNA, 60 bp, Homo sapiens
  ref <308>: DATABASE ACCESSION NUMBER: U56387
ttgaccactcttcagagaatggatacaaatcctgcaaaaaatgtgatatcagttgtttga

SEQ ID NO: 649 - DNA, 60 bp, Homo sapiens
  ref <308>: DATABASE ACCESSION NUMBER: U74612
tcagctttcctgcaagaagaaatcctggttaaaaaagtcttttgtattgggtcaggagtt

SEQ ID NO: 650 - DNA, 60 bp, Homo sapiens
  ref <308>: DATABASE ACCESSION NUMBER: U81002
agtccgattcctagaacagcaaaccttatgtaacaatcaagtaaatgatttaacaacagc

SEQ ID NO: 651 - DNA, 60 bp, Homo sapiens
  ref <308>: DATABASE ACCESSION NUMBER: U96131
gaaactgtgtcaccctaaagaagcatataatcatagcattaaaaatgcacacattactcc

SEQ ID NO: 652 - DNA, 60 bp, Homo sapiens
  ref <308>: DATABASE ACCESSION NUMBER: V00522
ttcctgagctgaagtgcagatgacaatttaaggaagaatcttcttccccagctttgcagg

SEQ ID NO: 653 - DNA, 60 bp, Homo sapiens
  ref <308>: DATABASE ACCESSION NUMBER: X74794
gccgccatcagtgtaaatagagcttaaagtcatggtttggctgcataaaaaattttctaa

SEQ ID NO: 654 - DNA, 60 bp, Homo sapiens
  ref <308>: DATABASE ACCESSION NUMBER: Z26649
gaggcggaactgacggagattaaccgtcggcacatcactgagtcagtcaactccatccgt

SEQ ID NO: 655 - DNA, 60 bp, Homo sapiens
  ref <308>: DATABASE ACCESSION NUMBER: AA598803
gtattttatgtcacctagatctaattctgaaaacattgtaataaaataattagctataat

SEQ ID NO: 656 - DNA, 60 bp, Homo sapiens
  ref <308>: DATABASE ACCESSION NUMBER: NM_003158
ttgggtttctagtcctccttaccatcatctccatatgagagtgtgaaaataggaacacgt

SEQ ID NO: 657 - DNA, 60 bp, Homo sapiens
  ref <308>: DATABASE ACCESSION NUMBER: AW190932
taatttttgtagtgataggatccccctgaggccagagaatagggtttggagacaaaggag

SEQ ID NO: 658 - DNA, 60 bp, Homo sapiens
  ref <308>: DATABASE ACCESSION NUMBER: BE675111
agagagactgagcacaaatccactgctggaaattactattcagcagagaagctgggtctt

SEQ ID NO: 659 - DNA, 60 bp, Homo sapiens
  ref <308>: DATABASE ACCESSION NUMBER: NM_018605
atacatgtatttagtaggggactgtttttaaggtagtaaaacacaaggaccttcacaaga

SEQ ID NO: 660 - DNA, 60 bp, Homo sapiens
  ref <308>: DATABASE ACCESSION NUMBER: NM_018692
taaagtgaattgagaacagtgaggtctgtctttgcttaacctattcaaccagaaatgaat

SEQ ID NO: 661 - DNA, 60 bp, Homo sapiens
  ref <308>: DATABASE ACCESSION NUMBER: Contig1352
aaacattttgcacatacatgtattgtacaacagtaagatcctctgttaaaaccagctgtc

SEQ ID NO: 662 - DNA, 60 bp, Homo sapiens
  ref <308>: DATABASE ACCESSION NUMBER: Contig1938
accaggcttgtgctcagagaagcagacaaaacaaagattcaaggttttaattaattccca

SEQ ID NO: 663 - DNA, 60 bp, Homo sapiens
  ref <308>: DATABASE ACCESSION NUMBER: Contig2313
aaaggaggggctttaaaataccttcttgacaaaaatcaacaatgcacaacttacaaagtg

SEQ ID NO: 664 - DNA, 60 bp, Homo sapiens
  ref <308>: DATABASE ACCESSION NUMBER: Contig3677
actcagtgccctaatttcccctgagggaatcgctttttaagtgatccttacagtggtgtt

SEQ ID NO: 665 - DNA, 60 bp, Homo sapiens
  ref <308>: DATABASE ACCESSION NUMBER: Contig6796
agctataacagtctcaaagaggggaatgattgaggtcctttagggaatgatgttttggta

SEQ ID NO: 666 - DNA, 60 bp, Homo sapiens
  ref <308>: DATABASE ACCESSION NUMBER: Contig8113
catgtaacagcctaacacttaaaggcactatgaaattaagagcaaataactgtcagatgg

SEQ ID NO: 667 - DNA, 60 bp, Homo sapiens
  ref <308>: DATABASE ACCESSION NUMBER: Contig8373
gaaaattgatatgagcatgtctgaatttttcccttataagagcctgagtattgtaacagg

SEQ ID NO: 668 - DNA, 60 bp, Homo sapiens
  ref <308>: DATABASE ACCESSION NUMBER: Contig9810
ctctatgcattcattagctaggacaacaatgcatttgcagtagtgagatttcgttaaaaa

SEQ ID NO: 669 - DNA, 60 bp, Homo sapiens
  ref <308>: DATABASE ACCESSION NUMBER: Contig173
attaaaccaagtactggaaacgtaactaaacagcgaaccatgtagcttcacctgactcag

SEQ ID NO: 670 - DNA, 60 bp, Homo sapiens
  ref <308>: DATABASE ACCESSION NUMBER: Contig32810
cagcctcctttcgaatgttcctggttgagagggagatcaattgcattatttacaagtcaa

SEQ ID NO: 671 - DNA, 60 bp, Homo sapiens
  ref <308>: DATABASE ACCESSION NUMBER: Contig34952
tgcaagactagtgcataaaaatgcaataggtgtcatatgtacagcattcttcttagagtt

SEQ ID NO: 672 - DNA, 60 bp, Homo sapiens
  ref <308>: DATABASE ACCESSION NUMBER: Contig35752
tgtgatgagtgtaacttcctgttttctccaaactaaaacactacgcagattcctgtaccg

SEQ ID NO: 673 - DNA, 60 bp, Homo sapiens
  ref <308>: DATABASE ACCESSION NUMBER: Contig37540
gaacggggcaagttcgtatttgaattctgttatatttatctaagggaagcaaaattaacc

SEQ ID NO: 674 - DNA, 60 bp, Homo sapiens
  ref <308>: DATABASE ACCESSION NUMBER: Contig47129
atggaggtgaacttaacaaccatacttgaatattccgtcttgactttgtaaactgtggct

SEQ ID NO: 675 - DNA, 60 bp, Homo sapiens
  ref <308>: DATABASE ACCESSION NUMBER: Contig49875
tgggaagatatgaaccaatccttatctacatgacacctacacatctagaactttacgaat

SEQ ID NO: 676 - DNA, 60 bp, Homo sapiens
  ref <308>: DATABASE ACCESSION NUMBER: Contig50368
aagacagcatcacccttatctccatgaagaacatcaacatgaataatggcaaacaaagtc

SEQ ID NO: 677 - DNA, 60 bp, Homo sapiens
  ref <308>: DATABASE ACCESSION NUMBER: Contig56307
ttctataagatgaggtagtggtgaactcagataacaaacttcccttctaaactggttctg

SEQ ID NO: 678 - DNA, 60 bp, Homo sapiens
  ref <308>: DATABASE ACCESSION NUMBER: Contig62306
agtccctggagaaattggtcagaatgatctgtcagaaccatttgaaaacttgctcaagag

SEQ ID NO: 679 - DNA, 60 bp, Homo sapiens
  ref <308>: DATABASE ACCESSION NUMBER: Contig10007
acctagggaataggacacaatcattttttctttttaaaacatctttatcccctgatcagc

SEQ ID NO: 680 - DNA, 60 bp, Homo sapiens
  ref <308>: DATABASE ACCESSION NUMBER: Contig13866
gctgcctaaagctacttacataatttgctattcagagaaatgcatttgtttattgaggac

SEQ ID NO: 681 - DNA, 60 bp, Homo sapiens
  ref <308>: DATABASE ACCESSION NUMBER: Contig15750
gagacaattatacctctgttaattaattgtaattctaattgtgtttataaagctaactaa

SEQ ID NO: 682 - DNA, 60 bp, Homo sapiens
  ref <308>: DATABASE ACCESSION NUMBER: Contig16098
acacgttatagtcaccttgaaatttcctctgctattttccaattaaaagcttaatagccc

SEQ ID NO: 683 - DNA, 60 bp, Homo sapiens
  ref <308>: DATABASE ACCESSION NUMBER: Contig18296
ttgtgctgaatttacaaatgaagatagatttggctttagagagatcaaattgacctgtcc

SEQ ID NO: 684 - DNA, 60 bp, Homo sapiens
  ref <308>: DATABASE ACCESSION NUMBER: Contig18374
ctgccttcatggcagtaggctttaagtgggtgactggccccaggccgaaaaaagggtaca

SEQ ID NO: 685 - DNA, 60 bp, Homo sapiens
  ref <308>: DATABASE ACCESSION NUMBER: Contig18543
cgttcttatcttcatcctatgcaactttagaccgctactgttttttaaaagtgatttgat

SEQ ID NO: 686 - DNA, 60 bp, Homo sapiens
  ref <308>: DATABASE ACCESSION NUMBER: Contig20512
agaatatttgaaaataaaacaaagctttcagaaatccaactctgcaaaatggccccctac

SEQ ID NO: 687 - DNA, 60 bp, Homo sapiens
  ref <308>: DATABASE ACCESSION NUMBER: Contig21986
gtgccagtccatgaaagcagttcgcatagacttttcatgcagttgagtctaatttatatt

SEQ ID NO: 688 - DNA, 60 bp, Homo sapiens
  ref <308>: DATABASE ACCESSION NUMBER: Contig22337
tgtacagttaaacctaaaagtgtacttacagaattcttccacgtatcgagaagtttcatc

SEQ ID NO: 689 - DNA, 60 bp, Homo sapiens
  ref <308>: DATABASE ACCESSION NUMBER: Contig23475
aagcacgttaggatataatccaattgaaactgcaatatcgagaacatctcatcttatcac

SEQ ID NO: 690 - DNA, 60 bp, Homo sapiens
  ref <308>: DATABASE ACCESSION NUMBER: Contig24565
tctgtaggacagaggtgcaatagattatgttcaaaacctttttgacagcgtcgaatgaga

SEQ ID NO: 691 - DNA, 60 bp, Homo sapiens
  ref <308>: DATABASE ACCESSION NUMBER: Contig25938
tatcttgtttgtaaaatgaatatgtctacttcagttttaaactttaaattatcctaacaa

SEQ ID NO: 692 - DNA, 60 bp, Homo sapiens
  ref <308>: DATABASE ACCESSION NUMBER: Contig26022
ggccttgaggctgtaggatgacaacactttgactgtggaggtgctagtttgaataaatgt

SEQ ID NO: 693 - DNA, 60 bp, Homo sapiens
  ref <308>: DATABASE ACCESSION NUMBER: Contig26059
ggcaaagagatctccaaccgcttggtcatttccagccactgcgtctccttcacgccaaag

SEQ ID NO: 694 - DNA, 60 bp, Homo sapiens
  ref <308>: DATABASE ACCESSION NUMBER: Contig26492
agcctattgtgtaaatatatacagaagactgagaggttttcaaccgaataaatgaatgcc

SEQ ID NO: 695 - DNA, 60 bp, Homo sapiens
  ref <308>: DATABASE ACCESSION NUMBER: Contig27623
agtgggtactgtgatatcttgagggacatgaatttaacaagagaaataaactgctgtatg

SEQ ID NO: 696 - DNA, 60 bp, Homo sapiens
  ref <308>: DATABASE ACCESSION NUMBER: Contig28286
ggtcatttgtcatcaagtcgtctgtaatacagaaaacgataaatacaacctaacagttca

SEQ ID NO: 697 - DNA, 60 bp, Homo sapiens
  ref <308>: DATABASE ACCESSION NUMBER: Contig28947
agacagattccaactggttaatgatattgtttgtaagaaagagattctgttggttgactg

SEQ ID NO: 698 - DNA, 60 bp, Homo sapiens
  ref <308>: DATABASE ACCESSION NUMBER: Contig29543
acatccattgaggtcacattcttgaagtgcattttgaggaagtcattattttcgctacag

SEQ ID NO: 699 - DNA, 60 bp, Homo sapiens
  ref <308>: DATABASE ACCESSION NUMBER: Contig30993
actggtcaacgactgtaacaggttacatcaggtgtttttctacatactttttacacagat

SEQ ID NO: 700 - DNA, 60 bp, Homo sapiens
  ref <308>: DATABASE ACCESSION NUMBER: Contig31361
aatgttgcaaaaagaaacagaaatacctgctaatatgcccttctaattaaggatgatgcc

SEQ ID NO: 701 - DNA, 60 bp, Homo sapiens
  ref <308>: DATABASE ACCESSION NUMBER: Contig31646
gccagaccagaattacacagttcaaattattgcatacaataaagataaagaaagcaagcc

SEQ ID NO: 702 - DNA, 60 bp, Homo sapiens
  ref <308>: DATABASE ACCESSION NUMBER: Contig31885
cctcatcttattcctgacatgtaaaaatcaattttacgtagagtcaacattgtaggtagg

SEQ ID NO: 703 - DNA, 60 bp, Homo sapiens
  ref <308>: DATABASE ACCESSION NUMBER: Contig32604
tactgtgtttttctatcctgaaactaaatggcgtacgcttcatagtggctaagatactcc

SEQ ID NO: 704 - DNA, 60 bp, Homo sapiens
  ref <308>: DATABASE ACCESSION NUMBER: Contig33814
gagtctttgggataccattaaaaagaagaaaatttcagcctctacaagtcacaacagaag

SEQ ID NO: 705 - DNA, 60 bp, Homo sapiens
  ref <308>: DATABASE ACCESSION NUMBER: Contig34019
gaactttgtgctttggcgttccacccctgttgttacttgttactgagtttcctagacctg

SEQ ID NO: 706 - DNA, 60 bp, Homo sapiens
  ref <308>: DATABASE ACCESSION NUMBER: Contig34154
gtgaaaactgaaagctgcttcgatactacttcaaagccagattattctgggaactgaagg

SEQ ID NO: 707 - DNA, 60 bp, Homo sapiens
  ref <308>: DATABASE ACCESSION NUMBER: Contig34430
ggcgtatcttctaacgatgtcgtcaccattagtatattcttcctgctaaaaataaatatc

SEQ ID NO: 708 - DNA, 60 bp, Homo sapiens
  ref <308>: DATABASE ACCESSION NUMBER: Contig34667
gaaaaagaggcttgaggaagacaacaggttcttcacctgcatctgtggatatatattttt

SEQ ID NO: 709 - DNA, 60 bp, Homo sapiens
  ref <308>: DATABASE ACCESSION NUMBER: Contig34766
ctccttgtatcctgttgtgaaaatcagaagactttctctttctccaaaaaagaataaagc

SEQ ID NO: 710 - DNA, 60 bp, Homo sapiens
  ref <308>: DATABASE ACCESSION NUMBER: Contig35030
tttgtatggaatattacttctatcagaagatgatcaagatgtttcagtccagtgcacatc

SEQ ID NO: 711 - DNA, 60 bp, Homo sapiens
  ref <308>: DATABASE ACCESSION NUMBER: Contig36243
gcctctctttctgttttgcttgatgtttacttctcgttcagactcaaataaagccttttt

SEQ ID NO: 712 - DNA, 60 bp, Homo sapiens
  ref <308>: DATABASE ACCESSION NUMBER: Contig37198
tgactgtgaattgtggaaagggcagtagatctctaatgtggaggtgggaacattattgtg

SEQ ID NO: 713 - DNA, 60 bp, Homo sapiens
  ref <308>: DATABASE ACCESSION NUMBER: Contig37966
tgaaatcactgtggtccaaatgtaattcttacacactcaaattatcactgtctgtagcac

SEQ ID NO: 714 - DNA, 60 bp, Homo sapiens
  ref <308>: DATABASE ACCESSION NUMBER: Contig38463
atcctctacagtgactaacccaaaccagcaccaggcagggacccaataaacctttgtgaa

SEQ ID NO: 715 - DNA, 60 bp, Homo sapiens
  ref <308>: DATABASE ACCESSION NUMBER: Contig38901
tgttcccaaatctgattcctcctattgtcttgtaaatcaaactctaagtgaaaacttccc

SEQ ID NO: 716 - DNA, 60 bp, Homo sapiens
  ref <308>: DATABASE ACCESSION NUMBER: Contig39031
ttcagacctaaagatccagatagtatctctgttcatatgtgaataagttgaagattgtgg

SEQ ID NO: 717 - DNA, 60 bp, Homo sapiens
  ref <308>: DATABASE ACCESSION NUMBER: Contig39795
gtttggcgatctgaaagggaaaatgagacaaattgtgaacatcttgtaattctgtctaga

SEQ ID NO: 718 - DNA, 60 bp, Homo sapiens
  ref <308>: DATABASE ACCESSION NUMBER: Contig40120
tgcaaagttgtaatgtaaaatgtgaccttacctctgtctaacctgtattgttcacatgaa

SEQ ID NO: 719 - DNA, 60 bp, Homo sapiens
  ref <308>: DATABASE ACCESSION NUMBER: Contig40552
tttgagcttcctgtttgacaatgtttgctgttgattttttgttcaataaagaatttggta

SEQ ID NO: 720 - DNA, 60 bp, Homo sapiens
  ref <308>: DATABASE ACCESSION NUMBER: Contig41413
cagctcagaccatttcctaatcagttgaaagggaaacaagtatttcagtctcaaaattga

SEQ ID NO: 721 - DNA, 60 bp, Homo sapiens
  ref <308>: DATABASE ACCESSION NUMBER: Contig41990
ttctaaataactaaagcttgatttactcttgctaggattatgtgactactaggtaggagc

SEQ ID NO: 722 - DNA, 60 bp, Homo sapiens
  ref <308>: DATABASE ACCESSION NUMBER: Contig42036
agtattattaacttttttctgtacaaatattagcactaaatgtttaaatatgtatgaatg

SEQ ID NO: 723 - DNA, 60 bp, Homo sapiens
  ref <308>: DATABASE ACCESSION NUMBER: Contig42103
acagtttgtaacagacgtggatgaagaatagctctgcaggacgaatgccttagtttccac

SEQ ID NO: 724 - DNA, 60 bp, Homo sapiens
  ref <308>: DATABASE ACCESSION NUMBER: Contig43289
cttacccaacttgataacgatgctgttcattagcagcctttgttaactgataaccaagag

SEQ ID NO: 725 - DNA, 60 bp, Homo sapiens
  ref <308>: DATABASE ACCESSION NUMBER: Contig43648
agtgcgagagataaaggcctccaagagaaaaaagaaacaaaccaaagatttaaccattta

SEQ ID NO: 726 - DNA, 60 bp, Homo sapiens
  ref <308>: DATABASE ACCESSION NUMBER: Contig43747
tcaatggttagcagaagggagaaaagaaagcaggaaaatgtgctattgagattccagtgg

SEQ ID NO: 727 - DNA, 60 bp, Homo sapiens
  ref <308>: DATABASE ACCESSION NUMBER: Contig43759
actgttccaccgttgtgcatattgttgcttctgaaccacaaactgtataaatggatggtt

SEQ ID NO: 728 - DNA, 60 bp, Homo sapiens
  ref <308>: DATABASE ACCESSION NUMBER: Contig43898
ttatgtagttagaatatttggaacctgcattagttccagcaatgaaagtaagacacacag

SEQ ID NO: 729 - DNA, 60 bp, Homo sapiens
  ref <308>: DATABASE ACCESSION NUMBER: Contig43927
gcaaataactcgtataggctaatcaacaggcttataagttaaaagggctaccgctcggcc

SEQ ID NO: 730 - DNA, 60 bp, Homo sapiens
  ref <308>: DATABASE ACCESSION NUMBER: Contig44291
atttgaaaaatattagatcccaagaaatctattccgtttgcattggacttctcggattcc

SEQ ID NO: 731 - DNA, 60 bp, Homo sapiens
  ref <308>: DATABASE ACCESSION NUMBER: Contig45032
ttaacctagttcaatgtgcttttaatgtacgttacagctttcacagagttaaaaggctga

SEQ ID NO: 732 - DNA, 60 bp, Homo sapiens
  ref <308>: DATABASE ACCESSION NUMBER: Contig45441
ccctcacctctgtgaattatcatgaagagtcctttaagagtataaatagaagacaaagaa

SEQ ID NO: 733 - DNA, 60 bp, Homo sapiens
  ref <308>: DATABASE ACCESSION NUMBER: Contig45565
ggacacagagtctgggatctaataattcagtcattttggatggactaaaaagaagacaga

SEQ ID NO: 734 - DNA, 60 bp, Homo sapiens
  ref <308>: DATABASE ACCESSION NUMBER: Contig45816
gggaatttgatgcagtaaagattaccctgttttatgattgttccttgaaagtcaaatggg

SEQ ID NO: 735 - DNA, 60 bp, Homo sapiens
  ref <308>: DATABASE ACCESSION NUMBER: Contig45821
agctaccctaggctgagattgcactcgccttctaagaacctcaataaagagactctgggg

SEQ ID NO: 736 - DNA, 60 bp, Homo sapiens
  ref <308>: DATABASE ACCESSION NUMBER: Contig46351
gcaaaagtgcatgaaactgtcagtaatattgtagtctataaagggaaattgctcttagag

SEQ ID NO: 737 - DNA, 60 bp, Homo sapiens
  ref <308>: DATABASE ACCESSION NUMBER: Contig46756
ggaagtatgattgaagtacctctcttttgtgactcttgtacagcttaatgtgcaataaag

SEQ ID NO: 738 - DNA, 60 bp, Homo sapiens
  ref <308>: DATABASE ACCESSION NUMBER: Contig46796
cccaggaatgtgcaaaatgcttgaaagttcaaacttcttttttgaaatgatcttcagatc

SEQ ID NO: 739 - DNA, 60 bp, Homo sapiens
  ref <308>: DATABASE ACCESSION NUMBER: Contig47308
ggcagtaagagtctatgatgttctgaaacttttcacagtaaatccaaagattacagacct

SEQ ID NO: 740 - DNA, 60 bp, Homo sapiens
  ref <308>: DATABASE ACCESSION NUMBER: Contig47793
tggagaacacattctctgaaaatactgtaaatacgttggggatttgttcaatgtgaaatc

SEQ ID NO: 741 - DNA, 60 bp, Homo sapiens
  ref <308>: DATABASE ACCESSION NUMBER: Contig48215
ttaaaattcacacacatgtaatcgaaacgcaatactataaagttctactggtgagactcc

SEQ ID NO: 742 - DNA, 60 bp, Homo sapiens
  ref <308>: DATABASE ACCESSION NUMBER: Contig48353
ttttagtttgtattattaatatatcatgttaccttatatattaatctactcttgattctg

SEQ ID NO: 743 - DNA, 60 bp, Homo sapiens
  ref <308>: DATABASE ACCESSION NUMBER: Contig49270
agttttaccaaagataatgaaatctcgcatcatgtctgcattttaccatagattggagtg

SEQ ID NO: 744 - DNA, 60 bp, Homo sapiens
  ref <308>: DATABASE ACCESSION NUMBER: Contig49279
gaaaacaaattgttatgattgagtgggtatacctttgtgattctgtctagtgaaaatggg

SEQ ID NO: 745 - DNA, 60 bp, Homo sapiens
  ref <308>: DATABASE ACCESSION NUMBER: Contig49773
aaagatcagcagaaatagggttttctcatcttcaccatcaataaacatttattgcgtacc

SEQ ID NO: 746 - DNA, 60 bp, Homo sapiens
  ref <308>: DATABASE ACCESSION NUMBER: Contig49869
cattgctcgaaatgttccagtctacaaatggtccgaagatggtgatttatttttgtaaaa

SEQ ID NO: 747 - DNA, 60 bp, Homo sapiens
  ref <308>: DATABASE ACCESSION NUMBER: Contig50470
cacgctttccatcgttcagtatttgatgacacaaaattccagttctaatgttgggcatca

SEQ ID NO: 748 - DNA, 60 bp, Homo sapiens
  ref <308>: DATABASE ACCESSION NUMBER: Contig50661
ggaatcacaggatttatcatcacagaaacaactgttttaagattagttccatcactctca

SEQ ID NO: 749 - DNA, 60 bp, Homo sapiens
  ref <308>: DATABASE ACCESSION NUMBER: Contig50841
cacaagccttctaaactcaaggatttaaactcaacttaaggttgagctttaaacttccaa

SEQ ID NO: 750 - DNA, 60 bp, Homo sapiens
  ref <308>: DATABASE ACCESSION NUMBER: Contig50900
tatggaatcctccaaaagaatacattatggagtgtagtgttttcttagttcttcaaaggg

SEQ ID NO: 751 - DNA, 60 bp, Homo sapiens
  ref <308>: DATABASE ACCESSION NUMBER: Contig51456
agcaatcccatttgggagttattttgatactgcgatgagtaagggtaagggcgcatggaa

SEQ ID NO: 752 - DNA, 60 bp, Homo sapiens
  ref <308>: DATABASE ACCESSION NUMBER: Contig51710
gaaacagagaagaggtcttaacctaatgcgcatagagaaattgttctcattgtaaacata

SEQ ID NO: 753 - DNA, 60 bp, Homo sapiens
  ref <308>: DATABASE ACCESSION NUMBER: Contig52193
gtcttgataatgaatcacttttgccagtaattggcctcttccaaaagtgatccttctgac

SEQ ID NO: 754 - DNA, 60 bp, Homo sapiens
  ref <308>: DATABASE ACCESSION NUMBER: Contig52419
gaggtacacgaggaaatggaattggtatttcattttaattttcatgactactaactcacc

SEQ ID NO: 755 - DNA, 60 bp, Homo sapiens
  ref <308>: DATABASE ACCESSION NUMBER: Contig52543
cacatctaataagtacatgggaaagatgctaatggttgactttgcattaaaaacgttgtc

SEQ ID NO: 756 - DNA, 60 bp, Homo sapiens
  ref <308>: DATABASE ACCESSION NUMBER: Contig53180
cctaattttctctcctggtagctgaacaaaggtctaaattagcttaacaaaagaacaggc

SEQ ID NO: 757 - DNA, 60 bp, Homo sapiens
  ref <308>: DATABASE ACCESSION NUMBER: Contig54096
tgctacaggcggtgtctttgatatttctaatttggaccgactaggcaaatcagaggtgga

SEQ ID NO: 758 - DNA, 60 bp, Homo sapiens
  ref <308>: DATABASE ACCESSION NUMBER: Contig54666
acatgggcccggctttcctggatatcaggacttccaataaataaagactctgtatactgg

SEQ ID NO: 759 - DNA, 60 bp, Homo sapiens
  ref <308>: DATABASE ACCESSION NUMBER: Contig54895
aaacatcacaagccaatggggctcaaagacaaatcccacatgttctcaaggccgttaagt

SEQ ID NO: 760 - DNA, 60 bp, Homo sapiens
  ref <308>: DATABASE ACCESSION NUMBER: Contig54926
gtcaacacttccagttactcaacagcttctgaaatttaaatctctggaacaatttacagt

SEQ ID NO: 761 - DNA, 60 bp, Homo sapiens
  ref <308>: DATABASE ACCESSION NUMBER: Contig54956
ccacaggggatttatggatacaacagcaaacattttataaactatgcacatgcattacac

SEQ ID NO: 762 - DNA, 60 bp, Homo sapiens
  ref <308>: DATABASE ACCESSION NUMBER: Contig54993
cagtgcaagtgagtataactctaactgatgttccacaaaacatttttgatttcaggtttg

SEQ ID NO: 763 - DNA, 60 bp, Homo sapiens
  ref <308>: DATABASE ACCESSION NUMBER: Contig55725
gctgtgccattcaatgtttgatgcataattggaccttgaatcgataagtgtaaatacagc

SEQ ID NO: 764 - DNA, 60 bp, Homo sapiens
  ref <308>: DATABASE ACCESSION NUMBER: Contig55883
tattctttatcccaattaacttgaggtactctaatgatgaagcactcgattgcactatga

SEQ ID NO: 765 - DNA, 60 bp, Homo sapiens
  ref <308>: DATABASE ACCESSION NUMBER: Contig55997
gaagagcagaggttagaagtcaaagaacatattcttgaaagttatgatgcattcttttgg

SEQ ID NO: 766 - DNA, 60 bp, Homo sapiens
  ref <308>: DATABASE ACCESSION NUMBER: Contig56298
acttcaaagccaaggtacagggtgataacttgtggtccagcatcagttttctccacttct

SEQ ID NO: 767 - DNA, 60 bp, Homo sapiens
  ref <308>: DATABASE ACCESSION NUMBER: Contig56843
accaactctacaacattacctgtcatatactgaagaatctcttcttccagttatgcagca

SEQ ID NO: 768 - DNA, 60 bp, Homo sapiens
  ref <308>: DATABASE ACCESSION NUMBER: Contig56852
cagataaacttgaattgacacgtggtgtaataaaatggacaaattctgtagagtagacac

SEQ ID NO: 769 - DNA, 60 bp, Homo sapiens
  ref <308>: DATABASE ACCESSION NUMBER: Contig57584
aggaatggcttgttttcttagactcctcctcagctaccaaactgggactcacagctttat

SEQ ID NO: 770 - DNA, 60 bp, Homo sapiens
  ref <308>: DATABASE ACCESSION NUMBER: Contig57803
tagcaaccagctaatatttacccagaggtactgcaatagagtatttcaaaatggaatcag

SEQ ID NO: 771 - DNA, 60 bp, Homo sapiens
  ref <308>: DATABASE ACCESSION NUMBER: Contig58260
gatgagatcattgcaccatgtcagacttttgtatatgccttgaaaataaatgaaagtgag

SEQ ID NO: 772 - DNA, 60 bp, Homo sapiens
  ref <308>: DATABASE ACCESSION NUMBER: Contig59294
tggatgctgaacagcctgattatgatttggattctgaagatgaagtatttgtgaataaac

SEQ ID NO: 773 - DNA, 60 bp, Homo sapiens
  ref <308>: DATABASE ACCESSION NUMBER: Contig59870
atgtgggaggaattaagacaaatatttcagactggtgtaaaggacaaatatgacaacgac

SEQ ID NO: 774 - DNA, 60 bp, Homo sapiens
  ref <308>: DATABASE ACCESSION NUMBER: Contig63649
cagcctttcctcatgtcaacacagttcacaatatagttttcaaagtacagtttaaaactc
